(19) United States
(12) Patent Application Publication
(10) Pub. No.: US 2020/0306375 A1
(43) Pub. Date: Oct. 1, 2020

(54) COMPOSITIONS AND METHODS FOR TUMOR TRANSDUCTION

(71) Applicant: Aleta Biotherapeutics Inc., Natick, MA (US)

(72) Inventors: Roy Lobb, Wellesley, MA (US); Paul Rennert, Holliston, MA (US)

(21) Appl. No.: 16/487,752

(22) PCT Filed: Feb. 22, 2018
(86) PCT No.: PCT/US18/19266

§ 371 Date: Aug. 21, 2019

Related U.S. Application Data
(60) Provisional application No. 62/541,409, filed on Aug. 4, 2017.
(60) Provisional application No. 62/462,108, filed on Feb. 22, 2017.

(51) Int. Cl. A61K 39/395; A61K 48/00; A61K 38/17; A61K 35/17; A61P 35/00

(52) U.S. Cl. CPC A61K 39/39566; A61K 48/0016; A61P 35/00; A61K 35/17; A61K 38/1774

(57) ABSTRACT

The invention relates to cancer therapeutics, in particular, the system of making cancer cells more susceptible to effector cells by introduction of cellular therapy targets into the cancer cells.

### CROSS REFERENCE TO RELATED APPLICATIONS

[0001] This application claims priority to each of U.S. Provisional Patent Application Nos. 62/462,108 filed Feb. 22, 2017; and 62/541,409 filed Aug. 4, 2017, the entire contents of each of which are hereby incorporated by reference.

### BACKGROUND OF THE INVENTION

[0002] Recent examples of chimeric antigen receptor (CAR) T cell directed to solid tumors have been clinical (or even preclinical) failures. The invention described herein presents solutions for solid tumor and other oncology indications.

[0003] Cellular therapeutics that are introduced into cancer patients and traffic into tumor microenvironments encounter multiple barriers that limit their efficacy. These barriers include, but are not limited to: cellular anergy, intrinsic cell death, suboptimal cell trafficking, limited proliferation, limited effector function, poor “take” (survival, persistence and differentiation), active exclusion from tumors, persistent immunosuppression in the tumor microenvironment, and tumor-induced cell death. Almost all attempts to date to overcome these limitations require non-physiological manipulation of the cellular therapeutic both in vitro and in vivo. The efficacy of cellular therapeutics is therefore broadly hindered by both intrinsic and extrinsic factors.

[0004] Targeting solid tumors presents an additional set of challenges to overcome, for example, their overall lesser sensitivity to T cell mediated cytotoxicity, a microenvironment with differing immunosuppressive mechanisms between tumor types, and a lack of target antigens with favorable expression profiles. Additionally, solid tumors are heavily fortified against cellular therapeutic attack as they deploy an impenetrable extracellular matrix, hypoxia, and acidic pH. Despite the vast number of targets that have been investigated, only a small number are tumor-specific (e.g., expression is restricted to the tumor cell) and this finding, as such, illustrates the difficulty and the need to discover an effective solution for eliminating or reducing the tumor. Yet another problem for targeting tumors is the heterogeneity of the tumor cells which express different antigens and different levels of antigens. The invention described herein addresses these problems and provides additional benefits as well.

### SUMMARY OF THE INVENTION

[0005] The present invention is based, at least in part, upon the introduction of cellular therapy targets into cancer cells (e.g., tumor cells such as solid tumor cells) such that they are more susceptible to effector cells that can eliminate and/or reduce the cancer cells. As further detailed herein, cancer cells (e.g., tumors) can be transduced with fusion proteins. Such fusion proteins consist of a binding component fused to a target component. For example, the fusion protein can be (i) an antibody or antibody fragment which binds to one or more tumor-associated antigens (TAA) or tumor-specific antigens (TSA), fused to (ii) a target for cellular therapy, e.g. CD19; a cytokine-target fusion; a bi-specific T-cell engager (BiTE); or an anti-idiotype peptide or antibody or fragment thereof. They can also be transduced with CD19 variants (or mutants). These fusion proteins or variants (or mutants) can be secreted by the tumor cells and/or permeate the tumor microenvironment.

[0006] Accordingly, in one aspect, the invention provides for recombinant vectors encoding an antibody or antibody fragment to a tumor-associated antigens (TAA) or tumor-specific antigens (TSA) and a therapeutic agent, as a fusion protein. In other embodiments, the therapeutic agent is selected from the group consisting of a cytokines, peptides (e.g. anti-idiotype peptides), proteins, antibodies (e.g, anti-idiotype antibodies), antibody fragments, T-cellengager and NK-cell engager. In other embodiments, the tumor antigen is selected from the group consisting of glioma-associated antigen, carcinoembryonic antigen (CEA), β-human chorionic gonadotropin, alphafetoprotein (AFP), lectin-reactive AFP, thyroglobulin, RAGE-1, MN-CA IX, human telomerase reverse transcriptase, RU1 , RU2 (AS), intestinal carboxyi esterase, mut hsp70-2, M-CSF, prostase, prostate-specific antigen (PSA), PAP, NY-ESO- 1, LAGE-la, p53, prostein, PSMA, Her2/neu, survivin and telomerase, prostate-carcinoma tumor antigen- 1 (PCTA-1), MAGE, ELF2M, neutrophil elastase, ephrinB2, CD22, insulin growth factor (IGF)-I, IGF-II, IGF-I receptor and mesothelin, EphA2, HER2, GD2, Glypican-3, 5T4, 8H9, αvβ6 integrin, BCMA, B7-H3, B7-H6, CAIX, CA9, CD19, CD20, CD22, kappa light chain, CD30, CD33, CD38, CD44, CD44v6, CD44v7/8, CD70, CD123, CD138, CD171, CEA, CSPG4, EGFR, EGFRvIII, EGP2, EGP40, EPCAM, ERBB3, ERBB4, ErbB3/4, FAP, FAR, FBP, fetal AchR, Folate Receptor a, GD2, GD3, HLA-Al MAGE Al, HLA-A2, ILI IRa, IL13Ra2, KDR, Lambda, Lewis-Y, MCSP, Mesothelin, Mucl, MucI6, NCAM, NKG2D ligands, NY-ESO-1, PRAME, PSCA, PSC1, PSMA, ROR1, SURVIVIN, TAG72, TEM1, TEM8, VEGRR2, carcinoembryonic antigen, HMW-MAA, and VEGF receptors.

[0007] In other embodiments, the cytokine is capable of being secreted by a tumor cell comprising said vector. In other embodiments, the vector is a viral vector. In other embodiments, the vector integrates into the genome of a cancer cell. In other embodiments, the therapeutic agent is an antigen for a chimeric antigen receptor (CAR). In other embodiments, the therapeutic agent is an antigen for a T cell receptor (TCR). In other embodiments, the therapeutic agent is an antigen for an ADC antibody, ADCC antibody, and/or a radiotherapeutic antibody.

[0008] In some embodiments the therapeutic agent is an “anti-idiotype” peptide. In some embodiments, the therapeutic agent is an anti-idiotype” peptide that binds an antigen binding receptor of one or more additional cellular therapeutics (e.g., an scFv of a CAR-T cell). In some embodiments, an anti-idiotype peptide that binds an antigen binding receptor of one or more additional cellular therapeutics binds one or more CDRs of an antigen binding receptor (e.g., an scFv of a CAR-T cell).

[0009] In other embodiments, the therapeutic agent is an anti-idiotype antibody or fragment thereof. In some embodiments, the therapeutic agent is an anti-idiotype antibody or fragment that binds an antigen binding portion of one or more cellular therapeutics (e.g., an scFv of a CAR-T cell). For example, in some embodiments, the therapeutic agent is an anti-idiotype antibody or fragment (e.g., scFv) that binds to a B-cell specific marker antigen binding portion (e.g., a CAR that binds CD19, CD20, CD21, CD22, CD24, CD79a, CD79b, ROR1, or BCMA) of a CAR-T cell. Additionally, for example, in some embodiments, the therapeutic agent is an anti-idiotype antibody or fragment (e.g., scFv) that binds an anti-CD19 antibody or fragment (e.g., an anti-CD19 antibody (e.g., anti-CD19 scFv) expressed by a CAR-T cell). In other embodiments, the therapeutic agent is an immunostimulatory cytokine or molecule selected from the group consisting of TLR agonists, PAMP, DAMP and other stimulators. In other embodiments, the therapeutic agent is a peptide with immunomodulatory or anti-tumor properties.

[0010] In other embodiments, the TAA or TSA and therapeutic agent are expressed as a fusion protein. In other embodiments, the TAA or TSA is selected from the group consisting of a glioma-associated antigen, carcinoembryonic antigen (CEA), β-human chorionic gonadotropin, alphafetoprotein (AFP), lectin-reactive AFP, thyroglobulin, RAGE-1 , MN-CA IX, human telomerase reverse transcriptase, RU1 , RU2 (AS), intestinal carboxyi esterase, mut hsp70-2, M-CSF, prostase, prostate-specific antigen (PSA), PAP, NY-ESO- 1 , LAGE-la, p53, prostein, PSMA, Her2/neu, survivin and telomerase, prostate-carcinoma tumor antigen- 1 (PCTA-1), MAGE, ELF2M, neutrophil elastase, ephrinB2, CD22, insulin growth factor (IGF)-I, IGF-II, IGF-I receptor and mesothelin, EphA2, HER2, GD2, Glypican-3, 5T4, 8H9, αvβ6 integrin, BCMA, B7-H3, B7-H6, CAIX, CA9, CD19, CD20, CD22, kappa light chain, CD30, CD33, CD38, CD44, CD44v6, CD44v7/8, CD70, CD123, CD138, CD171, CEA, CSPG4, EGFR, EGFRvIII, EGP2, EGP40, EPCAM, ERBB3, ERBB4, ErbB3/4, FAP, FAR, FBP, fetal AchR, Folate Receptor a, GD2, GD3, HLA-Al MAGE AI, HLA-A2, ILl IRa, IL13Ra2, KDR, Lambda, Lewis-Y, MCSP, Mesothelin, Mucl, Mucl6, NCAM, NKG2D ligands, NY-ESO-1, PRAME, PSCA, PSC1, PSMA, ROR1, SURVIVIN, TAG72, TEM1, TEM8, VEGRR2, carcinoembryonic antigen, HMW-MAA, and VEGF receptors

[0011] In other aspects, the invention provides for recombinant vectors encoding a cytokine to a tumor expressed cytokine receptor and a therapeutic agent as a fusion protein. In some embodiments, the cytokine receptor is a type I receptor or a type II receptor.

[0012] In other aspects, the invention provides for recombinant tumor cells comprising a vector as described above and herein. In some embodiments, the tumor cell expresses one or more fusion proteins.

[0013] In other aspects, the invention provides for methods of producing a recombinant tumor cell capable of expressing a fusion protein comprising an antibody or antibody fragment to a tumor-associated antigens (TAA) or tumor-specific antigens (TSA) and a therapeutic agent, said method comprising (a) introducing a vector as described above and herein into a tumor cell; and (b) culturing the tumor cell such that the vector is transduced into the tumor cell. In some embodiments, the vector and/or its components integrate in the tumor cells' genome. In some embodiments, the TAA or TSA is selected from the group consisting of glioma-associated antigen, carcinoembryonic antigen (CEA), β-human chorionic gonadotropin, alphafetoprotein (AFP), lectin-reactive AFP, thyroglubilin, RAGE-1 , MN-CA IX, human telomerase reverse transcriptase, RU1 , RU2 (AS), intestinal carboxyiesterase, mut hsp70-2, M-CSF, prostase, prostate-specific antigen (PSA), PAP, NY-ESO- 1 , LAGE-la, p53, prostein, PSMA, Her2/neu, survivin and telomerase, prostate-carcinoma tumor antigen- 1 (PCTA-1), MAGE, ELF2M, neutrophil elastase, ephrinB2, CD22, insulin growth factor (IGF)-I, IGF-II, IGF-I receptor and mesothelin, EphA2, HER2, GD2, Glypican-3, 5T4, 8H9, αvβ6 integrin, BCMA, B7-H3, B7-H6, CAIX, CA9, CD19, CD20, CD22, kappa light chain, CD30, CD33, CD38, CD44, CD44v6, CD44v7/8, CD70, CD123, CD138, CD171, CEA, CSPG4, EGFR, EGFRvIII, EGP2, EGP40, EPCAM, ERBB3, ERBB4, ErbB3/4, FAP, FAR, FBP, fetal AchR, Folate Receptor a, GD2, GD3, HLA-Al MAGE AI, HLA-A2, ILl IRa, IL13Ra2, KDR, Lambda, Lewis-Y, MCSP, Mesothelin, Mucl, Mucl6, NCAM, NKG2D ligands, NY-ESO-1, PRAME, PSCA, PSC1, PSMA, ROR1, SURVIVIN, TAG72, TEM1, TEM8, VEGRR2, carcinoembryonic antigen, HMW-MAA, and VEGF receptors. In some embodiments, the TAA or TSA is an antigen for a chimeric antigen receptor (CAR). In some embodiments, the TAA or TSA is an antigen for a T cell receptor (TCR). In some embodiments, the therapeutic agent is an antigen for an ADC antibody, ADCC antibody, and/or a radiotherapeutic antibody. In other embodiments, the therapeutic agent is an anti-idiotype antibody or fragment thereof as described herein In some embodiments, the therapeutic agent is an immunostimulatory cytokine or molecule selected from the group consisting of TLR agonists, PAMP, DAMP and other stimulators. In some embodiments, the therapeutic agent is a peptide with immunomodulatory or anti-tumor properties.

[0014] In other aspects, the invention provides for methods of treating cancer in an individual in need thereof comprising administering a composition comprising a vector as described above and herein. In some embodiments, a fusion protein is expressed. In other embodiments, the cancer cell expresses a therapeutic agent that increases immune response against the cancer cell. In some embodiments, the cancer cell expresses one or more proteins or peptides that are capable of being recognized by or that recognize a CAR. In some embodiments, the cancer cell express one or more protein or peptide antigens that is capable of being recognized by a TCR. In some embodiments, the cancer cell express one or more fusion proteins containing therapeutic agents capable of being recognized by immune cells in the individual. In some embodiments, the method further comprises administration of CART cells to the individual.

### BRIEF DESCRIPTION OF THE DRAWINGS

[0015] FIG. 1 is a schematic showing a non-limiting example of the methods of introduction of a cellular therapy target into solid tumor cells. Step one corresponds to the transduction construct (e.g., tumor-selective transduction via e.g., viral transduction, RNA transduction, and gene insertion), and/or in vivo transduction and integration. Step two corresponds to the expression of a fusion protein (e.g., an antibody fragment to a tumor antigen fused to a CAR antigen, for example an scFv anti-tumor associated antigen (TAA) fused to CD19 or a fragment thereof). Step three corresponds to the antibody fragment fused to an antigen, e.g. CD19, which binds to tumor cells and presents the antigen, and all nearby tumor cells are coated with the antibody fragment fused to a protein, peptide, or other agent, for example, CD19, which is an antigen recognized by CAR T cells. Step four corresponds to the infusion in vivo of CAR T cells that recognize the CAR antigen (e.g., anti-CD19 CAR T cells). The response becomes cytotoxic to the CD19-coated tumor cell.

[0016] FIGS. 2A-2C demonstrate expression of fusion proteins from AAV transduced cells.

[0017] FIGS. 3A and 3B show summary results of an IFNγ ELISA measuring induction of IFNγ in CAR19 T- cells by expressed fusion proteins.

[0018] FIGS. 4A-4C show induction of cytotoxicity upon incubation of CAR19 T cells with AAV-1-expressed supernatant and BT474 cells.

[0019] FIG. 5 demonstrates secretion of anti- FMC63 (anti-Id) antibody from transfected 293T cells.

[0020] FIGS. 6A and 6B demonstrate expression of CAR19 (construct #140) with an FMC63 domain as detected by a Flag tag (6A) and detection of the CAR19 by anti- FMC63 antibody (86B).

[0021] FIGS. 7A-7C demonstrate Trastuzumab scFv/anti-ld scFv fusion proteins bind both FMC63 and Her2. FIG. 7A demonstrates binding of a Trastuzumab scFv/anti-ld scFv fusion protein to FMC63. FIG. 7B demonstrates binding of a Trastuzumab scFv/anti-ld scFv fusion protein to Her2. FIG. 7C demonstrates binding of a CD19 expressing construct (#42) with the FMC63 coated plate as a control.

[0022] FIGS. 8A and 8B demonstrate recognition of Her2 by Trastuzumab scFv/anti-ld scFv fusion proteins. FIG. 8A demonstrates Her2 expression on SKOV3 cells. FIG. 8B demonstrates binding to the SKOV3-Her2 cells by the Trastuzumab scFv/anti-ld scFv fusion protein.

[0023] FIG. 9 shows CAR19-mediated cytotoxicity redirected to HER2+SKOV3 cells by a Trastuzumab scFv/anti-ld scFv fusion protein.

[0024] FIGS. 10A and 10B summarize the calculated cytotoxicity of CAR19-mediated killing as redirected by a Trastuzumab scFv/anti-ld scFv fusion protein. FIG. 10A shows the calculated cytotoxicity. FIG. 1013 shows the calculated EC50 of construct #171.

[0025] FIG. 11 shows results of IFNγ ELISA for CAR19 killing redirected by construct #171.

[0026] FIGS. 12A and 12B demonstrate specificity of CAR19 redirected killing using Trastuzumab scFv/anti-ld scFv fusion proteins. FIG. 12A demonstrates results of CAR19-mediated cytotoxicity redirected to HER2+ SKOV3 cells by Trastuzumab scFv/anti-ld scFv construct #171 relative to a construct expressing an anti-Her2 protein (#16). FIG. 12B summaraizes the calculated cytotoxicity of CAR19-mediated killing as redirected by construct #171 or #16.

[0027] FIG. 13 demonstrates the lack of CAR19 redirected killing using Trastuzumab scFv/anti-ld scFv fusion proteins when the target cell (H929) lacks Her2.

### DETAILED DESCRIPTION OF THE INVENTION

[0028] The present invention is based, at least in part, upon the introduction of cellular therapy targets into solid tumor cells. Tumor cells can be transduced with fusion proteins such that the fusion proteins are secreted by the tumor cells and released to the tumor microenvironment to combat the tumor.

### I. Definitions

[0029] As used herein, the term “antibody” refers to a polypeptide that includes canonical immunoglobulin sequence elements sufficient to confer specific binding to a particular target antigen. As is known in the art, intact antibodies as produced in nature are approximately 150 kD tetrameric agents comprised of two identical heavy chain polypeptides (about 50 kD each) and two identical light chain polypeptides (about 25 kD each) that associate with each other into what is commonly referred to as a “Y-shaped” structure. Each heavy chain is comprised of at least four domains (each about 110 amino acids long)—an amino-terminal variable (VH) domain (located at the tips of the Y structure), followed by three constant domains: CH1, CH2, and the carboxy-terminal CH3 (located at the base of the Y's stem). A short region, known as the “switch”, connects the heavy chain variable and constant regions. The “hinge” connects CH2 and CH3 domains to the rest of the antibody. Two disulfide bonds in this hinge region connect the two heavy chain polypeptides to one another in an intact antibody. Each light chain is comprised of two domains—an amino-terminal variable (VL) domain, followed by a carboxy-terminal constant (CL) domain, separated from one another by another “switch”. Intact antibody tetramers are composed of two heavy chain-light chain dimers in which the heavy and light chains are linked to one another by a single disulfide bond; two other disulfide bonds connect the heavy chain hinge regions to one another, so that the dimers are connected to one another and the tetramer is formed. Naturally-produced antibodies are also glycosylated, typically on the CH2 domain. Each domain in a natural antibody has a structure characterized by an “immunoglobulin fold” formed from two beta sheets (e.g., 3-, 4-, or 5-stranded sheets) packed against each other in a compressed antiparallel beta barrel. Each variable domain contains three hypervariable loops known as “complement determining regions” (CDR1, CDR2, and CDR3) and four somewhat invariant “framework” regions (FR1, FR2, FR3, and FR4). When natural antibodies fold, the FR regions form the beta sheets that provide the structural framework for the domains, and the CDR loop regions from both the heavy and light chains are brought together in three-dimensional space so that they create a single hypervariable antigen binding site located at the tip of the Y structure. The Fc region of naturally-occurring antibodies binds to elements of the complement system, and also to receptors on effector cells, including for example effector cells that mediate cytotoxicity. As is known in the art, affinity and/or other binding attributes of Fc regions for Fc receptors can be modulated through glycosylation or other modification. In some embodiments, antibodies produced and/or utilized in accordance with the present disclosure include glycosylated Fc domains, including Fc domains with modified or engineered such glycosylation. For purposes of the present disclosure, in certain embodiments, any polypeptide or complex of polypeptides that includes sufficient immunoglobulin domain sequences as found in natural antibodies can be referred to and/or used as an “antibody”, whether such polypeptide is naturally produced (e.g., generated by an organism reacting to an antigen), or produced by recombinant engineering, chemical synthesis, or other artificial system or methodology. In some embodiments, an antibody is polyclonal; in some embodiments, an antibody is monoclonal. In some embodiments, an antibody has constant region sequences that are characteristic of mouse, rabbit, primate, or human antibodies. In some embodiments, antibody sequence elements are fully human, or are humanized, primatized, chimeric, etc, as is known in the art. Moreover, the term “antibody” as used herein, can refer in appropriate embodiments (unless otherwise stated or clear from context) to any of the art-known or developed constructs or formats for utilizing antibody structural and functional features in alternative presentation. For example, in some embodiments, an antibody utilized in accordance with the present disclosure is in a format selected from, but not limited to, intact IgG, IgE and IgM, anti-idiotype antibodies, bi- or multi-specific antibodies (e.g., Zybodies®, etc), single chain Fvs, polypeptide-Fc fusions, Fabs, cameloid antibodies, masked antibodies (e.g., Probodies®), Small Modular ImmunoPharmaceuticals (“SMIPsTM”), single chain or Tandem diabodies (TandAb®), VHHs, Anticalins®, Nanobodies®, minibodies, BiTE®s, ankyrin repeat proteins or DARPINs®, Avimers®, a DART, a TCR-like antibody, Adnectins®, Affilins®, Trans-bodies®, Affibodies®, a TrimerX®, MicroProteins, Fynomers®, Centyrins®, and a KALBITOR®. In some embodiments, an antibody may lack a covalent modification (e.g., attachment of a glycan) that it would have if produced naturally. In some embodiments, an antibody may contain a covalent modification (e.g., attachment of a glycan, a payload (e.g., a detectable moiety, a therapeutic moiety, a catalytic moiety, etc.), or other pendant group (e.g., poly-ethylene glycol, etc.)).

[0030] As used herein, an “antibody fragment” includes a portion of an intact antibody, such as, for example, the antigen-binding or variable region of an antibody. Examples of antibody fragments include Fab, Fab′, F(ab′)₂, and Fv fragments; triabodies; tetrabodies; linear antibodies; single-chain antibody molecules; and multi-specific antibodies formed from antibody fragments. For example, antibody fragments include isolated fragments, “Fv” fragments (consisting of the variable regions of the heavy and light chains), recombinant single chain polypeptide molecules in which light and heavy chain variable regions are connected by a peptide linker (“ScFv proteins”), and minimal recognition units consisting of the amino acid residues that mimic the hypervariable region. In many embodiments, an antibody fragment contains sufficient sequence of the parent antibody of which it is a fragment that it binds to the same antigen as does the parent antibody; in some embodiments, a fragment binds to the antigen with a comparable affinity to that of the parent antibody and/or competes with the parent antibody for binding to the antigen. Examples of antigen binding fragments of an antibody include, but are not limited to, Fab fragment, Fab′ fragment, F(ab′)₂ fragment, scFv fragment, Fv fragment, dsFv diabody, dAb fragment, Fd′ fragment, Fd fragment, and an isolated complementarity determining region (CDR) region. An antigen binding fragment of an antibody may be produced by any means. For example, an antigen binding fragment of an antibody may be enzymatically or chemically produced by fragmentation of an intact antibody and/or it may be recombinantly produced from a gene encoding the partial antibody sequence. Alternatively or additionally, antigen binding fragment of an antibody may be wholly or partially synthetically produced. An antigen binding fragment of an antibody may optionally comprise a single chain antibody fragment. Alternatively or additionally, an antigen binding fragment of an antibody may comprise multiple chains which are linked together, for example, by disulfide linkages. An antigen binding fragment of an antibody may optionally comprise a multimolecular complex. A functional antibody fragment typically comprises at least about 50 amino acids and more typically comprises at least about 200 amino acids.

[0031] As used herein, “antigen” means a molecule that provokes an immune response; and/or an agent that binds to a T cell receptor (e.g., when presented by an MHC molecule) or to an antibody or antibody fragment. In some embodiments, an antigen elicits a humoral response (e.g., including production of antigen-specific antibodies); in some embodiments, an antigen elicits a cellular response (e.g., involving T-cells whose receptors specifically interact with the antigen). In some embodiments, an antigen binds to an antibody and may or may not induce a particular physiological response in an organism. In general, an antigen may be or include any chemical entity such as, for example, a small molecule, a nucleic acid, a polypeptide, a carbohydrate, a lipid, a polymer (in some embodiments other than a biologic polymer (e.g., other than a nucleic acid or amino acid polymer)) etc. In some embodiments, an antigen is or comprises a polypeptide. In some embodiments, an antigen is or comprises a glycan. Those of ordinary skill in the art will appreciate that, in general, an antigen may be provided in isolated or pure form, or alternatively may be provided in crude form (e.g., together with other materials, for example in an extract such as a cellular extract or other relatively crude preparation of an antigen-containing source), or alternatively may exist on or in a cell. In some embodiments, an antigen is a recombinant antigen.

[0032] Idiotope: As used herein, the term “idiotope” refers to a unique antigenic determinant (epitope) of a variable region of an antibody, or antigen binding portion.

[0033] Idiotype: As used herein the term “idiotype” refers to a set of idiotopes of a particular antibody, or antigen binding portion.

[0034] The term, “autologous” refers to any material derived from the same individual to which it is later re-introduced into the individual.

[0035] The term “cell therapy antigen” as used herein is meant to refer to one or more antigens (that are genetically engineered or naturally occurring) that can be recognized by effector cells (e.g., genetically engineered CAR T cell or genetically engineered or naturally occurring TCR). An antigen that is expressed on tumors (i.e., “tumor-associated antigen” or TAA) is one type of cell therapy antigen. An antigen that is expressed selectively on tumors (i.e., “tumor-selective antigen” or TSA) is also a type of cell therapy antigen. An antigen can also be expressed on tumor cells through therapeutic intervention, for example, by transducing tumor cells, in vivo, with genetic materials of the present invention, as described herein.

[0036] As used herein, the term “fusion protein” generally refers to a polypeptide including at least two segments, each of which shows a high degree of amino acid identity to a peptide moiety that (1) occurs in nature, and/or (2) represents a functional domain of a polypeptide. Typically, a polypeptide containing at least two such segments is considered to be a fusion protein if the two segments are moieties that (1) are not included in nature in the same peptide, and/or (2) have not previously been linked to one another in a single polypeptide, and/or (3) have been linked to one another through action of the hand of man.

[0037] The term “promoter” refers to a region of a DNA sequence that directs expression of genes. The promoter is typically upstream from the start of transcription start site and is involved in recognition and binding of RNA polymerase and other transcription machinery (e.g., other proteins) to initiate transcription of a polynucleotide sequence.

[0038] The term “solid tumor” is meant as an abnormal mass that usually does not contain cysts or liquid areas. Solid tumors can be benign or malignant. Different types of solid tumors are named for the types of cells that form them (such as sarcomas, carcinomas, and lymphomas). Examples of solid tumors such as sarcomas and carcinoma, include fibrosarcoma, myxosarcoma, liposarcoma, chondrosarcoma, osteosarcoma, and other sarcomas, synovioma, mesothelioma, Ewing's tumor, leiomyosarcoma, rhabdomyosarcoma, colon carcinoma, lymphoid malignancy, pancreatic cancer, breast cancer, lung cancers, ovarian cancer, prostate cancer, hepatocellular carcinoma, squamous cell carcinoma, basal cell carcinoma, adenocarcinoma, sweat gland carcinoma, medullary thyroid carcinoma, papillary thyroid carcinoma, pheochromocytomas sebaceous gland carcinoma, papillary carcinoma, papillary adenocarcinomas, medullary carcinoma, bronchogenic carcinoma, renal cell carcinoma, hepatoma, bile duct carcinoma, choriocarcinoma, Wilms' tumor, cervical cancer, testicular tumor, seminoma, bladder carcinoma, melanoma, and CNS tumors (such as a glioma (such as brainstem glioma and mixed gliomas), glioblastoma (also known as glioblastoma multiforme) astrocytoma, CNS lymphoma, germinoma, medulloblastoma, Schwannoma craniopharyogioma, ependymoma, pinealoma, hemangioblastoma, acoustic neuroma, oligodendroglioma, menangioma, neuroblastoma, retinoblastoma and brain metastases.

[0039] An “individual” or “subject” can be a vertebrate, a mammal, or a human. Mammals include, but are not limited to, farm animals, sport animals, pets, primates, mice and rats. In one aspect, a subject is a human. An “individual” or “subject” can be a “patient” (e.g., under the care of a physician) but in some cases, an individual or subject is not a patient.

[0040] “Pseudoviruses” or “papilloma pseudoviruses” or “papillomavirus gene transfer vectors” refer to one or more papillomavirus capsid proteins that assemble and package heterologous nucleic acids (e.g., DNA) with or without viral nucleic acids (e.g., DNA) into infectious particles. The methods used to produce papilloma pseudoviruses are known in the art and are described, for example, in U.S. Pat. Nos. 6,599,739, 7,205,126, and 6,416,945; and in Buck and Thomspon, Production of Papillomavirus-Based Gene Transfer Vectors. Current Protocols in Cell Biology 26.1.1-26.1.19, December 2007, all of which are incorporated by reference.

[0041] The term “T cell receptor” or “TCR” refers to a heterodimeric receptor found on the surface of T lymphocytes. TCRs are antigen-specific molecules that are responsible for recognizing antigenic peptides of the major histocompatibility complex (MHC) on the surface of antigen presenting cells (APCs), or any other nucleated cell. They are members of the immunoglobulin superfamily, and typically consist of two chains; alpha (α) and beta (β), while a small subset of TCRs are formed by variable gamma (γ) and delta (δ) chains. The chains pair on the surface of a T cell to form a heterodimeric receptor.

[0042] The term “transfected” or “transformed” or “transduced” is defined as a process by which exogenous nucleic acid is transferred or introduced into the host cell. A “transfected” or “transformed” or “transduced” cell is one which has been transfected, transformed or transduced with exogenous nucleic acid. The cell includes the primary subject cell and its progeny. In some embodiments, the host cell is a cancer cell, for example a tumor cell such as solid tumor cell.

[0043] The term “tropism” refers to the movement or targeting of a viral vector towards a receptor.

[0044] A “vector” is a composition which comprises an isolated nucleic acid, and which can be used to deliver the isolated nucleic acid to the interior of a cell. Numerous vectors are known in the art including, but not limited to, linear polynucleotides, polynucleotides associated with ionic or amphiphilic compounds, plasmids, and viruses. Thus, the term “vector” includes an autonomously replicating plasmid or a virus. The term should also be construed to include non-plasmid and non-viral compounds which facilitate transfer of nucleic acid into cells, such as, for example, polylysine compounds, liposomes, and the like. Examples of viral vectors include, but are not limited to, adenoviral vectors, adeno-associated virus and phage vectors (AAVP), retroviral vectors, human papilloma virus (HPV) pseudovirus vectors, and the like.

### II. Compositions

[0045] The invention provides for compositions that can be used for introduction of fusion proteins into cancer cells (e.g., tumor cells) that will make the cancer cells more susceptible for destruction by either an individual's immune system and/or additional therapeutic agents. Compositions can include, but are not limited to, vectors and various constructs described herein, host cells (including tumor cells) containing such vectors and/or constructs, host cells expressing or capable of expressing these vectors and/or constructs, kits containing the vectors, constructs, instructions, and/or reagents and the like.

[0046] Cancer cells (e.g., tumors) can be transduced with fusion proteins. As the fusion proteins are expressed (and/or secreted), the proteins can also permeate the tumor microenvironment. Non-limiting examples of fusion proteins contemplated by the invention include: antibody fusions so that the antibody or antibody fragment binds to one or more tumor-associated antigens (TAA) or tumor-specific antigens (TSA), cytokine target fusions, bi-specific T-cell engagers (BITES) or CD19 variants. In some embodiments, a fusion protein includes an antibody or fragment that binds a tumor antigen described herein, and an anti-idiotype antibody or fragment.

### Vector Design

[0047] The nucleic acid sequences coding the desired gene of interest can be cloned into a number of types of vectors. For example, the nucleic acid can be cloned into a plasmid, a phagemid, a phage derivative, an animal virus, and a cosmid. Other vectors can include expression vectors, replication vectors, probe generation vectors, sequencing vectors, and viral vectors. In other examples, the vector can be a foamy viral (FV) vector, a type of retroviral vector made from spumavirus. Viral vector design and technology is well known in the art as described in Sambrook et al, (Molecular Cloning: A Laboratory Manual, 2001), and in other virology and molecular biology manuals.

### Transduction Methods

[0048] Transfer of nucleic acid to a cell for gene-modification of the cell in order for the cell to express a gene of interest is widely performed via transduction (e.g., viral transduction). The nucleic acid sequence coding for the desired gene of interest or portion thereof (e.g., tumor associated antigen) can be obtained using recombinant methods known in the art. Exemplary methods include screening libraries from cells expressing the gene, deriving the gene from a vector, or isolating directly from cells and tissues. These methods are performed using standard techniques. In other embodiments, the gene of interest can be produced synthetically rather than cloned. Gene delivery methods are well-known in the art, for example, U.S. Pat. No. 5,399,346.

### Viral Transduction

[0049] Viruses are highly efficient at nucleic acid delivery to specific cell types, while often avoiding detection by the infected host immune system. These features make certain viruses attractive candidates as vehicles for introduction of cellular therapy targets into cancer cells, e.g., solid tumor cells. A number of viral based systems have been developed for gene transfer into mammalian cells. Examples of viral vectors include, but are not limited to, retroviruses, adenoviruses, adeno-associated viruses, herpes viruses, lentiviruses, poxviruses, herpes simplex 1 virus, herpes virus, oncoviruses (e.g., murine leukemia viruses), and the like. In general, a suitable vector contains an origin of replication functional in at least one organism, a promoter sequence, convenient restriction endonuclease sites, and one or more selectable markers, (e.g., WO 01/96584; WO 01/29058; and U.S. Pat. No. 6,326,193).

[0050] Lentiviral and Retroviral transduction can be enhanced by the addition of polybrene (SantaCruz sc-134220; Millipore TR-1003-G; Sigma 107689), a cationic polymer (also known as hexamehtrine bromide) that is used to increase the efficiency of the retrovirus transduction.

[0051] For example, retroviruses provide a platform for gene delivery systems. Retroviruses are enveloped viruses that belong to the viral family Retroviridae. Once in a host's cell, the virus replicates by using a viral reverse transcriptase enzyme to transcribe its RNA into DNA. The retroviral DNA replicates as part of the host genome, and is referred to as a provirus. A selected gene can be inserted into a vector and packaged in retroviral particles using techniques known in the art. The recombinant virus can then be isolated and delivered to cells of the subject either in vivo or ex vivo. A number of retroviral systems are known in the art, for example See U.S. Pat Nos. 5,994,136, 6,165,782, and 6,428,953.

[0052] Retroviruses include the genus of Alpharetrovirus (e.g., avian leukosis virus), the genus of Betaretrovirus; (e.g., mouse mammary tumor virus) the genus of Deltaretrovirus (e.g., bovine leukemia virus and human T-lymphotropic virus), the genus of Epsilonretrovirus (e.g., Walleye dermal sarcoma virus), and the genus of Lentivirus.

[0053] In other embodiments, the retrovirus is a lentivirus a genus of viruses of the Retroviridae family, characterized by a long incubation period. Lentiviruses are unique among the retroviruses in being able to infect non- dividing cells; they can deliver a significant amount of genetic information into the DNA of the host cell, so they are one of the most efficient methods of a gene delivery vector. Lentiviral vectors have an advantage to other viral vectors in that they can transduce non-proliferating cells and show low immunogenicity. In some examples, the lentivirus includes, but is not limited to human immunodeficiency viruses (HIV-1 and HIV-2), simian immunodeficiency virus (S1V), feline immunodeficiency virus (FIV), equine infections anemia (EIA), and visna virus. Vectors derived from lentiviruses offer the means to achieve significant levels of gene transfer in vivo.

[0054] In embodiments, the vector is an adenovirus vector. Adenoviruses are a large family of viruses containing double stranded DNA. They replicate the DNA of the host cell, while using the host's cell machinery to synthesize viral RNA DNA and proteins. Adenoviruses are known in the art to affect both replicating and non-replicating cells, to accommodate large transgenes, and to code for proteins without integrating into the host cell genome.

[0055] In some embodiments, an AAVP vector is used. The AAVP vector is a hybrid of prokaryotic-eukaryotic vectors, which are chimeras of genetic cis-elements of recombinant adeno-associated virus and phage. An AAVP combines selected elements of both phage and AAV vector systems, providing a vector that is simple to produce in bacteria with no packaging limit, while allowing infection of mammalian cells combined with integration into the host chromosome. Vectors containing many of the appropriate elements are commercially available, and can be further modified by standard methodologies to include the necessary sequences. Among other things, AAVPs do not require helper viruses or trans-acting factors. In addition, the native tropism of AAV for mammalian cells is eliminated since there is not AAV capsid formation. Other methods and details are in U.S. Pat. No. 8,470,528 and Hajitou A. et al., Cell, 125: 358-398, both of which are incorporated herein by reference.

[0056] In other aspects, a human papilloma (HPV) pseudovirus is used. Recent studies have shown that DNA plasmids can be packaged into papillomavirus L1 and L2 capsid protein to generate pseudovirion that can efficiently deliver DNA. The encapsulation protects the DNA from nucleases and provides a targeted delivery with great stability. Many of the safety concerns associated with the use of viral vectors are mitigated with the HPV pseudoviros because its construct is different from the natural HPV viral genome. Other methods and examples are in Hung, C., et al., Plos One, 7:7(e40983); 2012, U.S. Pat. No. 8,394,411, and Kines, R., et al Int J of Cancer, 2015, all of which are incorporated herein by reference.

[0057] In some aspects, an oncolytic virus is used. Oncolytic virus therapy selectively replicates the virus in cancer cells, and subsequently spreads within a tumor without affecting normal tissue. Alternatively, the oncolytic virus preferentially infects and kills cells without causing damage to normal tissues. Oncolytic viruses are also effective at inducing immune responses to themselves as well as to the infected tumor cell. Typically, oncolytic viruses fall into two classes: (I) viruses that naturally replicate preferentially in cancer cells and are nonpathogenic in humans. Exemplary class (I) oncolytic viruses include autonomous parvoviruses, myxoma virus (poxvirus), Newcastle disease virus (NDV; paramyxovirus), reovirus, and Seneca valley virus (picornavirus). A second class (II), include viruses that are genetically manipulated for use as vaccine vectors, including measles virus (paramyxovirus), poliovirus (picornavirus), and vaccinia virus (poxvirus). Additionally, oncolytic viruses may include those genetically engineered with mutations/deletions in genes required for replication in normal but not in cancer cells including adenovirus, herpes simplex virus, and vesicular stomatitis virus. Oncolytic viruses can be used as a viral transduction method due to their low probability of genetic resistance because they can target multiple pathways and replicate in a tumor-selective method. The viral dose within the tumor can increase with time due to in situ viral amplification (as compared to small molecule therapies which decrease with time), and safety features can be built in (i.e., drug and immune sensitivity).

### Integration

[0058] In some aspects of the invention, the nucleic acids encoding cellular therapy target(s) or tumor-associated antigen(s) are integrated as part of the tumor cells' genetic makeup. Without being bound by theory, integration of the nucleic acid encoding cellular therapy target(s) can be helpful in that as the tumor cell replicates, progeny tumor cells would express the cellular therapy target(s) and, as such, be susceptible to the effector cells and other therapeutic agents (including combination therapy agents). It follows that in some indications, such as metastatic disease, the state of rapid tumor cell proliferation becomes useful in propagating the therapeutics of the present invention.

[0059] In one embodiment, integration can be achieved by using viruses that naturally integrate into the host cell. Integration is a crucial step in replication of retroviruses as it is a virus genome that has been integrated into the DNA of a host cell. Integration is not part of the viral replication cycle, but it can occasionally occur. The virus does not directly make new DNA copies of itself while integrated into the host genome; alternatively, it is passively replicated along with the host genome and passed on to the original cell's offspring. Integration of the viral DNA results in permanent insertion of the viral genome into the host chromosomal DNA, referred as a provirus in the case of retroviruses.

[0060] In other embodiments, integration can be achieved by commercially available kits, including the CompoZr® Targeted Integration Kit which is designed to integrate a gene of interest into the adeno-associated virus integration site 1 (AAVS1) on human chromosome 19.

[0061] In addition to the expression of TAA, the cancer cells (e.g., solid tumor cells) can be engineered so that they also express one or more fusion proteins of an antibody or antibody fragment (e.g., scFv) coupled to an antigen that an effector cell will recognize. The antibody or antibody fragment recognizes the tumor cell and binds and presents the antigen for an effector cell to recognize. In one non-limiting example, a solid tumor cell can be transduced with a fusion protein that includes an anti-tumor TAA scFv that binds to a tumor cell, and also part or all of the human CD19 protein. The scFv portion binds to the tumor cell and the CD19 is presented to effector cells for them to target the tumor cell and destroy the tumor cell.

[0062] In another embodiment, the cancer cells (e.g., solid tumor cells) can be engineered so that they also express one or more fusion proteins of an antibody or antibody fragment (e.g., scFv) coupled to an anti-idiotype antibody that will recognize an effector cell. The antibody or antibody fragment recognizes the tumor cell and binds and presents the anti-idiotype antibody that binds an antigen binding portion of one or more cellular therapeutics (e.g., and scFv of a CAR-T cell). In one non-limiting example, a solid tumor cell can be transduced with a fusion protein that is an “scFv/anti-idiotype scFv” fusion protein that includes (i) an scFv that binds a tumor antigen (as described herein) at the N-terminus and (ii) an anti-idiotype scFv that binds to an antigen binding portion at the C-terminus. In some embodiments, a fusion protein is an “anti-idiotype scFv/scFv” fusion protein that includes (i) an anti-idiotype scFv that binds to an antigen binding portion at the N-terminus, and (ii) an scFv that binds a tumor antigen (as described herein) at the C-terminus.

[0063] In some such embodiments, after being expressed, such fusion protein is secreted from a tumor and can bind on or near a tumor cell via its anti-tumor antibody or fragment (e.g., scFv). Upon subsequent treatment with an additional cellular therapeutic (e.g., CAR-T cell), the fusion protein (bound to a tumor antigen) binds to such additional cellular therapeutic via its idiotope-binding protein (e.g., via its anti-idiotype antibody that recognizes an antigen binding receptor of a CAR-T cell). In some embodiments the antigen binding receptor binds a B cell specific marker. In some embodiments, a B cell specific marker is a B cell antigen. In some embodiments, a B cell specific marker is a neoantigen and/or an antigen expressed by a B cell lineage cancer cell. For example, a fusion protein can include (i) an scFv that binds to a tumor antigen and (ii) an anti-idiotype antibody (e.g., anti-idiotype scFv) that binds to a B-cell antigen binding domain (e.g., a CAR that binds CD19, CD20, CD21, CD22, CD24, CD79a, CD79b, ROR1, or BCMA) of a CAR-T cell. Additionally, for example, a fusion protein can include (i) an scFv that binds to a tumor antigen and (ii) an anti-idiotype antibody (e.g., anti-idiotype scFv) that binds to an anti-CD19 scFv on a CD19 CAR-T cell.

### Expressed Gene Approach for Solid Tumor Targeting

[0064] Genes productively introduced into tumor cells will provide improved cellular therapeutic activity by addressing or circumventing critical barriers to efficacy. These genes will improve therapeutic efficacy by “propagating” the anti-tumor response, optimize cytokine support in the local environment, reverse local immunosuppression, improve cellular effector functions, and promote cellular access to tumors. Any gene can be included in an expressed construct as described herein, and the present disclosure is not limited to any particular gene. Exemplary, non-limiting types of genes that can be included as cellular therapy targets include, e.g., targets for additional cellular therapeutics, polypeptide antigens, antibodies, cytokines, agents targeting tumor microenvironment, and agents supporting immune cell growth/proliferation.

[0065] An expressed gene contains a promotor with its associated elements, and a gene sequence. An expressed gene contains three essential characteristics: 1) an optimal promoter for expression in the tumor cell, 2) an optimal expressed gene sequence, and 3) an optimized expression pattern with defined kinetics. A set of promoters is developed to drive diverse expression patterns. Examples include; rapid and sustained expression, measured in days, or rapid but reversible expression, or delayed expression. Also, the level of expression can be modified by selective use of regulatory and promoter elements. Such methods are well understood, for example, E.D. Papadakis, et al., Current Gene Therapy, 4: 89-113 (incorporated herein by reference).

### Ill. Methods for Treating Cancer

[0066] The invention provides for compositions and methods for treating cancer by engineering a system whereby the cancer cells (e.g., tumor cells or solid tumor cells) secrete fusion proteins that include TAA or TSA and a therapeutic agent. An individual having cancer or suspected of having cancer can be given a composition that allows for the in vivo transduction of their cancer cells. The administration can be by any means, including, but not limited to intravenously, systemically, intramuscularly, intraperitonally, or intra-tumoral injection.

### Targets for Additional Cellular Therapeutics

[0067] In some embodiments, the cell therapy antigen that is expressed on local tumor cells following transduction and secretion of fusion proteins is recognized by the effector cells, and can comprise a tumor associated antigen (TAA). In one embodiment, TAA expression can be restricted to the tumor cell population alone, expressed by all tumor cells, and expressed on the tumor cell surface. Other antigens are overexpressed on tumor cells, but may be found on normal cells at lower levels of expression and thus are tumor-selective antigens (TSA). In addition, some tumor antigens arise as “passenger mutations”, i.e. are non-essential antigens expressed by tumor cells that have defective control over DNA repair, thus accumulating mutations in diverse proteins. Some tumor antigens are proteins that are produced by tumor cells that elicit an immune response; particularly T-cell mediated immune responses. Tumor-specific molecules that may be targeted by cellular therapy targets may include tumor associated antigens well known in the art and can include, for example, a glioma-associated antigen, carcinoembryonic antigen (CEA), β-human chorionic gonadotropin, alphafetoprotein (AFP), lectin-reactive AFP, thyroglobulin, RAGE-1 , MN-CA IX, human telomerase reverse transcriptase, RU1 , RU2 (AS), intestinal carboxyi esterase, mut hsp70-2, M-CSF, prostase, prostate-specific antigen (PSA), PAP, NY-ESO- 1 , LAGE-la, p53, prostein, PSMA, Her2/neu, survivin and telomerase, prostate-carcinoma tumor antigen- 1 (PCTA-1), MAGE, ELF2M, neutrophil elastase, ephrinB2, CD22, insulin growth factor (IGF)-I, IGF-II, IGF-I receptor and mesothelin. The application of technologies, including next generation sequencing (NGS) of tumor genomes and exomes, and high-sensitivity mass spectrometry (protein sequencing) analysis of the tumor proteome, is continuing to identify novel TAA and TSA antigens of use for this invention.

[0068] NGS is a method of high-throughput sequencing that performs massively parallel sequencing, during which millions of fragments of DNA from a single sample are sequenced in unison. NGS facilitates high-throughput sequencing, which allows an entire genome to be sequenced in less than one day. The creation of NGS platforms has made sequencing accessible to more labs, rapidly increasing the amount of research and clinical diagnostics being performed with nucleic acid sequencing, and thus have revolutionized genomics and molecular biology. Some NGS technologies include Illumina (Solexa) sequencing, Roche 454 sequencing, Ion torrent: proton/PGM sequencing, and SOLiD sequencing.

[0069] An alternative method for identifying tumor specific antigens is direct protein sequencing. Protein sequencing of enzymatic digests using multidimensional MS techniques (MSn) including tandem mass spectrometry (MS/MS)) can also be used to identify antigens. Such proteomic approaches permit rapid, highly automated analysis (See, e.g., K. Gevaert and J. Vandekerckhove, Electrophoresis 21: 1145- 1154 (2000, incorporated herein by reference)). Furthermore, high-throughput methods for de novo sequencing of unknown proteins may be used to analyze the proteome of a patient's tumor to identify expressed antigens. For example, meta shotgun protein sequencing may be used to identify expressed antigens (See e.g., Guthals et al. (2012), Molecular and Cellular Proteomics 11(10): 1084-96, incorporated herein by reference).

[0070] Non-limiting examples of tumor antigens that can used include EphA2, HER2, GD2, Glypican-3, 5T4, 8H9, αvβ6 integrin, BCMA, B7-H3, B7-H6, CAIX, CA9, CD19, CD20, CD22, kappa light chain, CD30, CD33, CD38, CD44, CD44v6, CD44v7/8, CD70, CD123, CD138, CD171, CEA, CSPG4, EGFR, EGFRvIII, EGP2, EGP40, EPCAM, ERBB3, ERBB4, ErbB3/4, FAP, FAR, FBP, fetal AchR, Folate Receptor a, GD2, GD3, HLA-Al MAGE Al, HLA-A2, ILl IRa, IL13Ra2, KDR, Lambda, Lewis-Y, MCSP, Mesothelin, Mucl, Mucl6, NCAM, NKG2D ligands, NY-ESO-1, PRAME, PSCA, PSC1, PSMA, ROR1, SURVIVIN, TAG72, TEM1, TEM8, VEGRR2, carcinoembryonic antigen, HMW-MAA, and VEGF receptors. Other exemplary antigens that can be used are antigens that are present with in the extracellular matrix of tumors, such as oncofetal variants of fibronectin, tenascin, or necrotic regions of tumors.

[0071] Additional tumor-selective molecules can be used include any membrane protein or biomarker that is expressed or overexpressed in tumor cells including, but not limited to, integrins (e.g., integrin αbβ3, α5β1), EGF Receptor Family (e.g., EGFR2, Erbb2/HER2/neu, Erbb3, Erbb4), proteoglycans (e.g., heparan sulfate proteoglycans), disialogangliosides (e.g., GD2, GD3), B7-H3 (aka CD276), cancer antigen 125 (CA- 125), epithelial cell adhesion molecule (EpCAM), vascular endothelial growth factor receptors 1 and 2 (VEGFR-1 , VEGFR-2), CD52, carcinoembryonic antigen (CEA), tumor associated glycoproteins (e.g., TAG-72), cluster of differentiation 19 (CD19), CD20, CD22, CD30, CD33, CD40, CD44, CD74, CD152, mucin 1 (M UC1), tumor necrosis factor receptors (e.g., TRAIL-R2), insulin-like growth factor receptors, folate receptor a, transmembrane glycoprotein NMB (GPNMB), C-C chemokine receptors (e.g., CCR4), prostate specific membrane antigen (PSMA), recepteur d'origine nantais (RON) receptor, cytotoxic T-lymphocyte antigen 4 (CTLA4), and other tumor specific receptors or antigens.

[0072] As exemplified by the non-limiting examples of TAA and TSA targets recited herein, there is a large and diverse selection of antigens to which one of skill in the art can direct the transduced and expressed therapeutics described herein. For example, the therapeutics might comprise a secreted fusion protein that contains a scFv antigen binding domain (e.g. anti-MUC16, anti-CEA, anti-PSMA) fused to the target antigen (e.g. CD19) that can be recognized by a CAR T cell. In this embodiment, the secreted fusion protein has two functional domains, the scFv that binds to the target tumor cell surface, and the CD19 protein domain that is presented as a target for the CAR T cell (FIG. 1). It will be immediately apparent that the scFv can be selected to target one of many diverse antigens, and that the protein domain to be recognized by the cellular therapeutic (also, the “effector cell” of the present invention), can also be diverse, e.g. recognized by a specific CAR T cell, or a TCR T cell, or a characterized TIL or an NK cell. It will be further recognized that modern antibody engineering allows the use of bispecific recognition to be built into the scFv portion of the therapeutic, such that effective binding to the tumor cells is accomplished only when both arms of a bispecific scFV can bind. The range of bispecific technologies available is broad and the molecular biology and protein chemistry tools and principles required for effective bispecific antibody engineering are well understood, see for example, Kontermann, R. MAbs 2012; 4(2) 182-97 (incorporated herein by reference).

[0073] Further, multiple genes can be encoded in a single CAR expression construct by using, for example, in frame or independent IRES initiation sites for individual elements. Alternatively, inducible methods have been described, whereby the application of a small molecule can induce or block expression of one or more CAR elements. A wide variety of such methods are disclosed, such as inhibitory CARs, costimulatory CARs, “cideCARs”, on switches and others, the use of which can further modify or alter the activity of CART cells (see Baas, T. SciBX 7(25); doi:10.1038/scibx.2014.725).

### Antibody-Drug Conjugate Targets

[0074] In other embodiments, the transduced tumor cells secrete fusion proteins that are targeted by antibody-drug conjugates that are known and include, e.g., brentuximab vedotin (ADCETRIS, Seattle Genetics); trastuzumab emtansine (Roche); Gemtuzumab ozogamicin (Pfizer); CMC-544; SAR3419; CDX-011; PSMA-ADC; BT-062; CD30, HER2, and IMGN901 (see, e.g., Sassoon et al., Methods Mol. Biol. 1045:1-27 (2013); Bouchard et al., Bioorganic Med. Chem. Lett. 24: 5357-5363 (2014)). In other embodiments, the transduced tumor cells secrete fusion proteins which can be targeted by antibodies having antibody dependent cellular cytotoxicity function such as those recognized by rituximab, ocrelizumab, ipilimumab, cituximab, erbitux and many others. Accordingly, in some embodiments, a nucleic acid encoding a polypeptide antigen as part of the fusion protein that binds to one or more of such known antibody-drug conjugates can be included in as a cellular therapy target described herein.

### Cytokine Fusion Proteins

[0075] In some embodiments, the tumor and/or tumor microenvironment is transduced with a cytokine fusion protein, e.g., a fusion protein of a cytokine (e.g., an anti-tumor cytokine) and a target for one or more additional cellular therapeutics described herein (e.g., a CAR-T target). Exemplary cytokines may bind to the tumors, and present the tumor with the cytokine. For example, some contemplated targets include CD19, CD20, CD21, CD22, CD24, and BCMA. Such a cellular therapy can provide both a target for one or more additional cellular therapeutics (e.g., a CAR-T target) and a stimulatory cytokine at a tumor surface. For example, an expressed and/or secreted construct can encode a cytokine-CD19 fusion protein, or a fusion of a cytokine and a CD19 fragment, e.g., a CD19 fragment to which a CD19- CAR-T cell binds. In some embodiments, a CD19 fragment is a CD19 IgC domain. Without wishing to be bound by theory, a single expressed construct encoding such a fusion protein advantageously allows a cellular therapeutic to be genetically engineered using a minimal (e.g., a single) transgene. An additional benefit of using cytokine fusion proteins is to utilize their tight binding to their receptors, in addition to the cytokine functional effect.

[0076] In some embodiments, one or more cytokines secreted as part of a cytokine fusion protein bind to cells at high affinity (e.g., KD of about 10⁻⁷, 10⁻⁸, 10⁻⁹, 10⁻¹⁰, 10⁻¹¹, or less) and/or have low internalization rates (e.g., less than about 10, 10², 10³, 10⁴, or 10⁵ cytokine molecules per cell per day). Binding affinity and internalization rates of various cytokines are known in the art and/or can be measured using known methods.

### Pro-Immune Response Agents

[0077] In some embodiments, the recombinant tumor described herein encodes, as a fusion protein as described herein, one or more pro-immune response agents, e.g., one or more cytokines used in cancer therapy. Non-limiting, exemplary cytokines that can be included include, e.g., IFNα, IFNβ, IFNγ, IL-1, IL-2, IL-7, IL-12, IL-15, IL-21, IL-36, TNF, LTα, GM-CSF, G-CSF, a TLR agonist, and an immune checkpoint antibody fragment.

[0078] Known problems associated with cytokine therapy include, e.g., high dose requirements, toxicity, and limited efficacy. Thus, in some embodiments, expressed constructs are used to deliver one or more cytokines at a specific site and/or at a specific dose (e.g., to reduce or eliminate one or more risks associated with cytokine therapy).

[0079] In some embodiments, expression of a cytokine (e.g., an immunostimulatory cytokine) at or near a surface of a tumor induces an immune response to the tumor. In some embodiments, an expressed cytokine fusion protein can be a target for one or more additional cellular therapeutics (e.g., one or more additional CAR-T cells). In some embodiments, secretion of a cytokine fusion protein near a surface of a tumor induces an immune response to the tumor and is also used as a target for one or more additional cellular therapeutics (e.g., one or more additional CAR-T cells). An example is an Interferon alpha cytokine fused to the CD19 protein domain recognized by a CAR T cell with CD19 reactivity. The IFNalpha molecule binds with high affinity to interferon receptors on or near the tumor cell, thus supporting cellular therapeutic activity directed to CD19. In another example, the interferon alpha cytokine is fused to a scFV that recognizes a TAA or a TSA on the same tumor cell type, thus binding back on to the cell and surrounding cells, and inducing or supporting an IFNalpha-driven immune response.

[0080] For example, release of IL-21 can be used to induce expansion and/or effector differentiation of CD8+ T cells and/or support NK cell activation and cytolytic activity. In one exemplary method, an expressed construct encodes IL-21. Upon binding of a scFv directed an antigen on a tumor cell, a cellular therapeutic described herein exhibits prolonged release of IL-21. Exemplary cellular therapeutics include, e.g., CAR-T cells, CAR-NK cells, TCR-T cells, TIL cells, allogenic NK cells, and autologous NK cells.

[0081] In another exemplary method, induced release of IL-15 fusion proteins can be used to support NK cell expansion and/or to recruit NK cells to promulgate an anti-tumor response and to support the survival and expansion of cellular therapeutics. Exemplary cellular therapeutics include, e.g., CAR-T cells, CAR-NK cells, TCR-T cells, TIL cells, allogenic NK cells, and autologous NK cells. In this example a scFv that recognizes a TAA or a TSA on the target tumor cell type binds, and presents IL-15 in the local environment. In a further exemplification, of relevance to all of the cytokine examples proposed, the secreted fusion protein is trifunctional, having a scFV that recognizes a TAA or a TSA on the target tumor cell type, a cytokine encoded into a beta loop or beta strand within the heavy or light chain variable region that is not engaged in antigen binding, and expressing a target antigen for the binding of a cellular therapeutic. The utilization of CDRs within the heavy and light variable domains of a scFv is readily determined from the sequence of the CDR as well as through the use of databases that indicate which residues are involved in antigen engagement and which are not involved but are otherwise solvent exposed, i.e. useful for expression of an encoded sequence such as a cytokine.

### Cell Recruiting Moieties

[0082] In some examples, the recombinant tumor cells can express, as part of a fusion protein, scFv or TCR that may be fused to cell recruiting moieties (e.g., anti-CD3, anti-CD16, or an anti-idiotype antibody or fragment). In other embodiments, bispecific T cell engager (BiTE®) technology is utilized to help engage the body's endogenous T cells and to target cancer cells that have been engineered to express one or more TAA's. The antibody constructs of the BiTE® technology are constructed by genetically linking the minimal binding domains of monoclonal antibodies for TAA or tumor-associated surface antigens and for the T cell receptor-associated molecule, onto a single polypeptide chain. One antibody is specific for a selected surface antigen on a targeted tumor cell, and the other antibody is specific for moiety (e.g., CD3), tied to the T-cell receptor complex on the surface of T cells. The BiTE® technology binds polyclonal cytotoxic T cells and targeted malignant cells.

### Polypeptide Antigens

[0083] In some embodiments, a target for one or more additional cellular therapeutics is or comprises a polypeptide antigen. The polypeptide antigen to be expressed by an expressed construct, and is not limited to any particular polypeptide or portion thereof, provided that an additional cellular therapeutic (e.g., CAR-T cell) can be engineered to recognize and bind to such polypeptide target. In some embodiments, the polypeptide target is a polypeptide that is not a tumor-associated antigen. In some embodiments, the target is a tumor antigen, e.g., BCMA, CD19, CD20, CD22, ROR1, mesothelin, CD33/IL3Ra, c-Met, PSMA, Glycolipid F77, EGFRvIII, GD-2, NY-ESO-1 TCR, or MAGE A3 TCR.

[0084] In some embodiments, the tumor and/or tumor microenvironment is transduced with a fusion protein comprising (i) an antibody or antigen-binding fragment thereof that binds to a tumor antigen described herein and (ii) an “anti-idiotype” peptide that binds an antigen binding receptor of one or more additional cellular therapeutics (e.g., an scFv of a CAR-T cell). In some embodiments, an anti-idiotype peptide that binds an antigen binding receptor of one or more additional cellular therapeutics binds one or more CDRs of an antigen binding receptor (e.g., an scFv of a CAR-T cell). In some embodiments, a fusion protein includes (i) an scFv that binds a tumor antigen (as described herein) at the N-terminus and (ii) an anti-idiotype peptide that binds to an antigen binding receptor (described herein) at the C-terminus. In some embodiments, a fusion protein includes (i) an anti-idiotype peptide that binds to an antigen binding receptor (described herein) at the N-terminus, and (ii) an scFv that binds a tumor antigen (as described herein) at the C-terminus.

[0085] One of skill in the art will recognize that several methods can be used to identify peptides that bind to antibodies or fragments thereof (e.g., scFvs or CDRs). Exemplary methods include screening or panning peptide libraries. For example, peptides that bind rituximab, an anti-CD20 antibody, have been identified (Klein et al. mABs 5:1, 22-33 January/February 2013; Philip et al. Blood. 2014 Aug 21;124(8):1277-87; Perosa et al. J Immunol 2007; 179: 7967-7974; Perosa et al. Blood. 2006 Feb 1;107(3):1070-7). In some embodiments, peptides that bind antibodies can be identified through the use of phage display libraries (see, e.g., Smith Science. 1985 Jun 14;228(4705):1315-7; Scott et al. Science. 1990 Jul 27;249(4967):386-90; Mintz et al. Nat Biotechnol. 2003 Jan;21(1):57-63; Spatola et al. Anal Chem. 2013; Rojas et al. MAbs. 2014;6(6):1368-76; Wang et al. Oncotarget. 2016 Nov 15;7(46):75293-75306; He et al. Virology Journal 2012, 9:217; Li et al. PLoS One. 2016 May 18;11(5):e0147361; de Oliveira-Junior et al. Biomed Res Int. 2015;2015:267989). In some embodiments, peptides that bind antibodies can be identified through screens of peptide libraries displayed on organisms other than phage (for example bacteria, see, e.g., US Pat. 9,309,510). In some embodiments, peptides that bind antibodies can be identified through other peptide libraries, for example, soluble peptide libraries (e.g., positional scanning libraries; see, for example, Pinilla et al. Biochem J. (1994) 301, 847-853), DNA-encoded cyclic libraries, etc. Any of such peptides can be used as an “anti-idiotype” peptide in methods and constructs described herein.

[0086] In some embodiments, after being expressed, such fusion protein is secreted from a transduced cell and can bind on or near a tumor cell via its anti-tumor antibody or fragment (e.g., scFv). Upon subsequent treatment with an additional cellular therapeutic (e.g., CAR-T cell), the fusion protein (bound to a tumor antigen) binds to such additional cellular therapeutic via its anti-idiotype peptide (e.g., that recognizes an antigen binding receptor of a CAR-T cell). For example, a fusion protein can include (i) an scFv that binds to a tumor antigen and (ii) an anti-idiotype peptide that binds to a B-cell specific marker binding domain (e.g., a CAR that binds CD19, CD20, CD21, CD22, CD24, CD79a, CD79b, ROR1, or BCMA) of a CAR-T cell. In some embodiments, a fusion protein can include (i) an scFv that binds to a tumor antigen and (ii) an anti-idiotype peptide that binds to an anti-CD19 scFv on a CD19 CAR-T cell.

### Antibody Fusion Proteins

[0087] In some embodiments, the tumor and/or tumor microenvironment is transduced with a fusion protein comprising (i) an antibody or antigen-binding fragment thereof that binds to a tumor antigen described herein and (ii) an anti-idiotype antibody or fragment that binds an antigen binding portion of one or more additional cellular therapeutics (e.g., an scFv of a CAR-T cell). In some embodiments, a fusion protein is an “scFv/anti-idiotype scFv” fusion protein that includes (i) an scFv that binds a tumor antigen (as described herein) at the N-terminus and (ii) an anti-idiotype scFv that binds to an antigen binding portion at the C-terminus. In some embodiments, a fusion protein is an “anti-idiotype scFv/scFv” fusion protein that includes (i) an anti-idiotype scFv that binds to an antigen binding portion at the N-terminus, and (ii) an scFv that binds a tumor antigen (as described herein) at the C-terminus.

[0088] In some such embodiments, after being expressed, such fusion protein is secreted from a tumor and can bind on or near a tumor cell via its anti-tumor antibody or fragment (e.g., scFv). Upon subsequent treatment with a cellular therapeutic (e.g., CAR-T cell), the fusion protein (bound to a tumor antigen) binds to such cellular therapeutic via its idiotope-binding protein (e.g., via its anti-idiotype antibody that recognizes an antigen binding portion of a CAR-T cell).₌In some embodiments the antigen binding receptor binds a B cell specific marker. In some embodiments, a B cell specific marker is a B cell antigen. In some embodiments, a B cell specific marker is a neoantigen and/or an antigen expressed by a B cell lineage cancer cell. For example, a fusion protein can include (i) an scFv that binds to a tumor antigen and (ii) an anti-idiotype antibody (e.g., anti-idiotype scFv) that binds to a B-cell specific marker binding domain (e.g., a CAR that binds CD19, CD20, CD21, CD22, CD24, CD79a, CD79b, ROR1, or BCMA) of a CAR-T cell. In some embodiments, a fusion protein can include (i) an scFv that binds to a tumor antigen and (ii) an anti-idiotype antibody (e.g., anti-idiotype scFv) that binds to an anti-CD19 scFv on a CD19 CAR-T cell.

[0089] Anti-idiotype antibodies are specific antibodies that can bind to the CDR sequences within a specific antibody of an antibody's scFv. Anti-idiotype antibodies can be characterized by their binding. Type 1 anti-idiotype antibodies bind to the CDRs of a target antibody variable domain in such a manner as to inhibit, disrupt or neutralize the activity of the target antibody, i.e., its ability to bind antigen. Type 2 anti-idiotype antibodies bind to the CDRs of the target antibody variable domains in such a manner as to be able to bind even when the antibody is bound to antigen. Thus Type 2 antibodies are not defined by their ability to inhibit or neutralize antigen binding. A Type 3 anti-idiotype antibody only binds a target antibody when is bound to antigen.

[0090] Anti-idiotype antibodies are known in the art, and any such antibody is useful in compositions and methods described herein. One example of a specific anti-idiotype antibody specific for an antibody scFv is antibody 136.20.1, which recognizes the scFv domain of the mouse anti-human antibody FMC63 (see, e.g., Jena B, et al. (2013) Chimeric Antigen Receptor (CAR)-Specific Monoclonal Antibody to Detect CD19-Specific T Cells in Clinical Trials. PLoS ONE 8(3): e57838; US 2016/0096902). The 136.20.1 antibody and its domains (e.g., the scFv domain), have been used to detect the FMC63 VH/VL pair, or scFv, e.g., as displayed on the surface of a CAR T cell. However, the 136.20.1 antibody has not previously been presented to an FMC63-based CAR T cell as a means of triggering CAR T activity. Indeed, in the scFv or similar monovalent format, 136.20.1 antibody triggering CART activity would not be expected. It has been shown that 136.20.1 binds to the antigen (CD19) recognition site of FMC63, since at concentrations above 5μg/mI136.20.1 inhibits binding of the FMC63 CART cell to CD19.

[0091] Another example is an anti-idiotype antibody that recognizes an anti-human CD22 scFv (as described in, e.g., Zhoa et al. 2014. Generation of Anti-Idiotype scFv for Pharmacokinetic Measurement in Lymphoma Patients Treated with Chimera Anti-CD22 Antibody SM03. PLoS ONE 9(5): e96697; US 2015/0175711). One such antibody is an anti-idiotype single-chain Fv (scFv) antibody specific for the murine (RFB4), chimeric (SM03) and humanized (SM06) versions of an anti-CD22 antibody that has the characteristics of a Type 1 anti-idiotypic antibody, that is, it binds specifically to the CDRs of the named anti-CD22 antibodies and inhibits the binding of the named antibodies to human CD22 protein. A Type 2 idiotypic antibody that specifically recognizes rituximab (a mouse-derived antibody to human CD20) has also been described (see Cragg et al. (2004) An anti-idiotype antibody capable of binding rituximab on the surface of lymphoma cells. Blood 104: 2540-2542).

[0092] Other examples include anti-idiotypic antibodies described by Dunn & Kehry in US 2013/0330323 A1. Other examples include myriad anti-idiotypic antibodies published and described. Other examples include novel anti-idiotypic antibodies as discovered in directed screening campaigns using the target antibody or scFv protein as immunogen or screening reagent.

[0093] In some embodiments, the tumor and/or tumor microenvironment is transduced with a fusion protein comprising an antibody (or antigen-binding fragment thereof, e.g., secreted scFv or other antibody formats) and a target for one or more additional cellular therapeutics (e.g., a CAR-T target). An antibody (or fragment) can be selected to bind, e.g., to a tumor antigen (e.g., a tumor antigen described herein), and its fusion partner can include a target for one or more additional cellular therapeutics. Such antibodies (or antigen-binding fragments) include, e.g., a monoclonal antibody (mAb), including, for example, scFv and full length mAbs, a VHH domain, a diabody, a nanobody, etc. In one example, a construct encodes a secreted fusion protein consisting of a mAb (e.g., an anti-tumor associated antigen mAb or antigen-binding fragment) and CD19 or a fragment thereof (e.g., a CD19 Ig domain). In some embodiments, an antibody (or fragment) binds to an antigen expressed on several types of cells. In some embodiments, an antibody (or fragment) binds to a tumor-selective antigen. In some embodiments, an antibody (or fragment) binds to a tumor-selective, but not specific, antigen. In some embodiments, an antibody (or fragment) binds to a tumor antigen associated with a hematologic malignancy. In some embodiments, an antibody (or fragment) binds to a tumor antigen associated with a solid tumor. In some embodiments, an antibody (or fragment) binds to one or more of BCMA, CD19, CD20, CD22, ROR1, mesothelin, CD33/IL3Ra, c-Met, PSMA, Glycolipid F77, EGFRvIII, GD-2, NY-ESO-1 TCR, and MAGE A3 TCR.

[0094] The target, which is placed on the tumor cells, can be CD19. Other B cell targets can be used, including but not limited to CD20, CD21, CD22, CD23, CD24, CD72, CD79a, CD79b, and BCMA. These B cell targets have particular advantages as CAR T cell targets, along with the list of other targets. In addition, the target can include CD30, Her 2, a target for ADC's or radioimmunotherapy (e.g., a monoclonal antibody carrying a radioisotope).

Peptides that Inhibit Local (e.g., Tumor Microenvironment) Factors

[0095] In some embodiments, peptides (e.g., polypeptides and fragments thereof) that inhibit local factors can be expressed as a fusion protein by the tumor cell. Nucleic acids coding for these peptides can be engineered as described herein and/or by any method known to one of skill in the art such that the peptide(s) are expressed. Non-limiting examples include TGFbeta, adenosine receptor 2, vascular endothelial growth factor (VEGF), platelet-derived growth factor (PDGF), indoleamine 2,3-dioxygenase 1 (ID01), and matrix metalloproteinases (MMPs)).

### CD19 as a Scaffold for Inducible CD19 Variant Proteins and CD19 Variant Fusion Proteins

[0096] CD19 is a 95 kd transmembrane glycoprotein belonging to the Ig superfamily and includes two extracellular C2-type Ig domains (see, e.g., Tedder Nature Rev. Rheum. 5:572-577 (2009); Wang et al., Exp. Hematol. Oncol. 2012 Nov 29;1(1):36. doi: 10.1186/2162-3619-1-36.)). In some embodiments, one or both of the C2-type Ig domains are used as scaffolds for mutagenesis, and CD19 variants (e.g., CD19 or a portion thereof that include one or more mutations within one or both C2-type Ig domains) can be screened and selected for binding to a target antigen described herein.

[0097] The nucleotide sequence of human CD19 is known (see Genbank Accession No. M84371.1). To provide variant nucleic acid sequences that encode CD19 variants that bind a particular antigen, a number of methods known in the art may be utilized. In some embodiments, a screening procedure is used that enables identification and/or isolation of nucleic acids that encode CD19 variants that bind a particular antigen. Exemplary methods include a so-called biopanning step, known from technologies such as phage display (Kang, A. S. et al. 1991. Proc Natl Acad Sci USA 88, 4363-4366), ribosome display (Schaffitzel, C. et al. 1999. J. Immunol. Methods 231, 119-135), DNA display (Cull, M. G. et al. 1992. Proc Natl Acad Sci USA 89, 1865-1869), RNA-peptide display (Roberts, R. W., Szostak, J. W., 1997. Proc Natl Acad Sci USA 94, 12297-12302), covalent display (WO 98/37186), bacterial surface display (Fuchs, P. et al. 1991. Biotechnology 9, 1369-1372), yeast surface display (Boder, E. T., Wittrup, K. D., 1997. Nat Biotechnol 15, 553-557) and eukaryotic virus display (Grabherr, R., Ernst, W., 2001. Comb. Chem. High Throughput. Screen. 4, 185-192). FACS and magnetic bead sorting are also applicable for enrichment (panning) purposes using labeled antigen. Immunodetection assays such as ELISA (Dreher, M. L. et al. 1991. J. Immunol. Methods 139, 197-205) and ELISPOT (Czerkinsky, C. C. et. al. 1983. J Immunol Methods. 65, 109-21) can also be used either following a biopanning step or alone.

[0098] Thus, in some embodiments, an inducible construct described herein encodes a CD19 variant (or fragment), either alone or as part of a fusion protein described herein. For example, an inducible construct described herein can encode a CD19 variant (or fragment) selected to bind to a tumor agent and which, upon expression, can bind to the tumor antigen and that itself can be a target for an additional cellular therapeutic (e.g., a CAR-T cell that binds CD19). In some embodiments, an inducible construct described herein encodes a CD19 variant that includes a C2-type Ig domain variant selected to bind a tumor antigen. Upon expression of the CD19 variant, the C2-type Ig domain binds to the tumor antigen on a tumor cell. Subsequently, treatment with (e.g., administration to a subject of) a CAR-T cell that recognizes CD19 kills the tumor cell to which the CD19 variant is bound. In some embodiments, an inducible construct described herein encodes a CD19 variant that includes variants of both C2-type Ig domains, each of which is selected to bind a tumor antigen (e.g., different epitopes of the tumor antigen). Upon expression of the CD19 variant, the C2-type Ig domains bind to the tumor antigen on a tumor cell. Subsequently, treatment with (e.g., administration to a subject of) a CAR-T cell that recognizes CD19 kills the tumor cell to which the CD19 variant is bound.

[0099] In some embodiments, a CD19 variant selected for binding to a target antigen is included in a fusion protein. For example, a CD19 variant that includes a C2-type Ig domain variant selected to bind a tumor antigen can be fused to an antibody or fragment thereof that also binds to the tumor antigen (e.g., to a different epitope on the tumor antigen). Exemplary fusion proteins include, e.g., CD19 variant/scFv fusion proteins and CD19 variant/VHH fusion proteins. An inducible construct described herein can encode such a CD19 variant/antibody fusion protein and upon expression, the CD19 variant and the antibody of the fusion protein bind to the tumor antigen on a tumor cell. Subsequently, treatment with (e.g., administration to a subject of) a CAR-T cell that recognizes CD19 kills the tumor cell to which the CD19 variant/antibody fusion protein is bound. In some embodiments, as described herein, the CD19 scaffold genes that are useful in the context of inducible expression will also be useful when modified for the production in vitro of soluble, purified fusion proteins. Additional, non-limiting examples of fusion proteins that include CD19 variants (or fragment) as a scaffold include, e.g., CD19 variant /cytokine fusion proteins and CD19 variant/TLR agonist fusion proteins.

[0100] Additional, non-limiting examples of fusion proteins that include CD19 (or fragment) as a scaffold include, e.g., CD19-cytokine fusion proteins, CD19-TLR agonist fusion proteins. Other B cell restricted cell surface markers which contain immunoglobulin-like domains include CD22, CD79a and CD79b. These Ig domains can also be mutagenized to generate variants binding TAA's and TSA's.

[0101] In some embodiments, a CD19 variant selected for binding to a target antigen is included in a fusion protein with an anti-idiotype antibody or fragment described herein. For example, a CD19 variant that includes an ECD variant or C2-type Ig domain variant selected to bind a tumor antigen can be fused to an anti-idiotype antibody or fragment thereof that binds to an antibody or portion on a cellular therapeutic, e.g., CAR-T cell. An expression construct described herein can encode such a CD19 variant/anti-idiotype antibody fusion protein and upon expression, the CD19 variant of the fusion protein binds to the tumor antigen on a tumor cell. Subsequently, treatment with (e.g., administration to a subject of) a CAR-T cell that expresses an antibody or fragment recognized by the anti-idiotype antibody or fragment kills the tumor cell to which the CD19 variant/anti-idiotype antibody fusion protein is bound. In some embodiments, an expression construct described herein can encode one or more CD19 variants. For example, in some embodiments, a first CD19 variant that includes an ECD variant or C2-type Ig domain variant selected to bind a tumor antigen can be fused to a second CD19 variant that includes an ECD variant or C2-type Ig domain variant selected to bind an antibody or fragment expressed on a cellular therapeutic (e.g., CAR-T cell).

[0102] In some embodiments, a CD19 variant selected for binding to a target antigen is included in a fusion protein with an anti-idiotype peptide that binds an antigen binding receptor of one or more additional cellular therapeutics as described herein. For example, a CD19 variant that includes an ECD variant or C2-type Ig domain variant selected to bind a tumor antigen can be fused to an anti-idiotype peptide that binds to an antibody or portion on a cellular therapeutic, e.g., CAR-T cell. An expression construct described herein can encode such a CD19 variant/anti-idiotype peptide fusion protein and upon expression, the CD19 variant of the fusion protein binds to the tumor antigen on a tumor cell. Subsequently, treatment with (e.g., administration to a subject of) a CAR-T cell that expresses an antibody or fragment recognized by the anti-idiotype peptide kills the tumor cell to which the CD19 variant/anti-idiotype peptide fusion protein is bound.

### Polypeptide Antigens and Antibodies

[0103] The below Table 1 presents a non-comprehensive list of certain human polypeptide antigens targeted by known, available antibody agents, and notes certain cancer indications for which the antibody agents have been proposed to be useful:

TABLE 1

| | Antibody (commercial or | |
|---|---|---|
| Human Antigen | scientific name) | Cancer indication |
| CD2 | Siplizumab | Non-Hodgkin's Lymphoma |
| CD3 | UCHT1 | Peripheral or Cutaneous T-cell Lymphoma |
| CD4 | HuMax-CD4 | |
| CD19 | SAR3419, MEDI-551 | Diffuse Large B-cell Lymphoma |
| CD19 and CD3 or | Bispecific antibodies such as | Non-Hodgkin's Lymphoma |
| CD22 | Blinatumomab, DT2219ARL | |
| CD20 | Rituximab, Veltuzumab, | B cell malignancies (Non-Hodgkin's |
| | Tositumomab, Ofatumumab, | lymphoma, Chronic lymphocytic leukemia) |
| | Ibritumomab, Obinutuzumab, | |
| CD22 (SIGLEC2) | Inotuzumab, tetraxetan, CAT- | Chemotherapy-resistant hairy cell |
| | 8015, DCDT29805, Bectumomab | leukemia, Hodgkin's lymphoma |
| CD30 | Brentuximab vedotin | |
| CD33 | Gemtuzumab ozogamicin | Acute myeloid leukemia |
| | (Mylotarg) | |
| CD37 | TRU-016 | Chronic lymphocytic leukemia |
| CD38 | Daratumumab | Multiple myeloma, hematological tumors |
| CD40 | Lucatumumab | Non-Hodgkin's lymphoma |
| CD52 | Alemtuzumab (Campath) | Chronic lymphocytic leukemia |
| CD56 (NCAM1) | Lorvotuzumab | Small Cell Lung Cancer |
| CD66e (CEA) | Labetuzumab | Breast, colon and lung tumors |
| CD70 | SGN-75 | Non-Hodgkin's lymphoma |
| CD74 | Milatuzumab | Non-Hodgkin's lymphoma |
| CD138 (SYND1) | BT062 | Multiple Myeloma |
| CD152 (CTLA-4) | Ipilimumab | Metastatic melanoma |
| CD221 (IGF1R) | AVE1642, IMC-A12, MK-0646, | Glioma, lung, breast, head and neck, |
| | R150, CP 751871 | prostate and thyroid cancer |
| CD254 (RANKL) | Denosumab | Breast and prostate carcinoma |
| CD261 (TRAILR1) | Mapatumumab | Colon, lung and pancreas tumors and |
| CD262 (TRAILR2) | HGS-ETR2, CS-1008 | haematological malignancies |
| CD326 (Epcam) | Edrecolomab, 17-1A, IGN101, | Colon and rectal cancer, malignant ascites, |
| | Catumaxomab, Adecatumumab | epithelial tumors (breast, colon, lung) |
| CD309 (VEGFR2) | IM-2C6, CDP791 | Epithelium-derived solid tumors |
| CD319 (SLAMF7) | HuLuc63 | Multiple myeloma |
| CD340 (HER2) | Trastuzumab, Pertuzumab, Ado- | Breast cancer |
| | trastuzumab emtansine | |
| CAIX (CA9) | cG250 | Renal cell carcinoma |
| EGFR (c-erbB) | Cetuximab, Panitumumab, | Solid tumors including glioma, lung, breast, |
| | nimotuzumab and 806 | colon, and head and neck tumors |
| EPHA3 (HEK) | KB004, IIIA4 | Lung, kidney and colon tumors, melanoma, |
| | | glioma and haematological malignancies |
| Episialin | Epitumomab | Epithelial ovarian tumors |
| FAP | Sibrotuzumab and F19 | Colon, breast, lung, pancreas, and head and |
| | | neck tumors |
| HLA-DR beta | Apolizumab | Chronic lymphocytic leukemia, non- |
| | | Hodkin's lymphoma |
| FOLR-1 | Farletuzumab | Ovarian tumors |
| 5T4 | Anatumomab | Non-small cell lung cancer |
| GD3/GD2 | 3F8, ch14.18, KW-2871 | Neuroectodermal and epithelial tumors |
| gpA33 | huA33 | Colorectal carcinoma |
| GPNMB | Glembatumumab | Breast cancer |
| HER3 (ERBB3) | MM-121 | Breast, colon, lung, ovarian, and prostate |
| | | tumors |
| Integrin αVβ3 | Etaracizumab | Tumor vasculature |
| Integrin α5β1 | Volociximab | Tumor vasculature |
| Lewis-Y antigen | hu3S193, IgN311 | Breast, colon, lung and prostate tumors |
| MET (HGFR) | AMG 102, METMAB, SCH900105 | Breast, ovary and lung tumors |
| Mucin-1/CanAg | Pemtumomab, oregovomab, | Breast, colon, lung and ovarian tumors |
| | Cantuzumab | |
| PSMA | ADC, J591 | Prostate Cancer |
| Phosphatidylserine | Bavituximab | Solid tumors |
| TAG-72 | Minretumomab | Breast, colon and lung tumors |
| Tenascin | 81C6 | Glioma, breast and prostate tumours |
| VEGF | Bevacizumab | Tumour vasculature |

[0104] Accordingly, a cellular therapeutic that targets an expressed construct encoding a polypeptide antigen can be used in combination with one or more of these (or other) known antibodies.

[0105] Exemplary amino acid and nucleotide sequences of the disclosure are listed in the following Table:

| Amino acid SEQ ID NO: | Nucleotide SEQ ID NO: | Name |
|---|---|---|
| 1 | 201 | Panitumumab Heavy Chain (HC) |
| 2 | 202 | CD19-D1-Panitumumab Light Chain (LC) |
| 3 | 203 | CD19-D1-Panitumumab HC |
| 4 | 204 | Panitumumab LC |
| 5 | 205 | Panitumumab LC-CD19-D1 |
| 6 | 206 | Panitumumab HC-CD19-D1 |
| 7 | 207 | LY2875358 HC |
| 8 | 208 | CD19-D1-LY2875358 LC |
| 9 | 209 | CD19-D1-LY2875358 HC |
| 10 | 210 | LY2875358 LC |
| 11 | 211 | LY2875358 LC-CD19-D1 |
| 12 | 212 | LY2875358 HC-CD19-D1 |
| 13 | 213 | FMC63 CAR-19 construct |
| 14 | 214 | CD19-D1 |
| 15 | 215 | CD19-D1-hulgGFc |
| 16 | 216 | Trastuzumab scFv (VH/VL) |
| 17 | 217 | MOC31 scFv (VH/VL) |
| 18 | 218 | MOC31 scFv (VL/VH) |
| 19 | 219 | LY2875358 scFv (VH/VL) |
| 20 | 220 | LY2875358 scFv (VL/VH) |
| 21 | 221 | Panitumumab scFv (VH/VL) |
| 22 | 222 | Panitumumab scFv (VL/VH) |
| 23 | 223 | CD19-D1+2-soluble TNF |
| 24 | 224 | Trastuzumab scFv (VH/VL)-CD19-D1 |
| 25 | 225 | Trastuzumab scFv (VH/VL)-CD19-D1- |
| | | hulgGFc |
| 26 | 226 | CD19-D1-Trastuzumab scFv (VH/VL) |
| 27 | 227 | CD19-D1-Trastuzumab scFv (VH/VL)- |
| | | hulgGFc |
| 28 | 228 | CD19-D1+2 |
| 29 | 229 | CD19-D1+D2-hulgGFc |
| 30 | 230 | CD19-D2 |
| 31 | 231 | CD19-D2-hulgGFc |
| 32 | 232 | CD19-D1+2-Panitumumab LC |
| 33 | 233 | CD19-D1+2-Panitumumab HC |
| 34 | 234 | Panitumumab LC-CD19-D1+2 |
| 35 | 235 | Panitumumab HC-CD19-D1+2 |
| 36 | 236 | CD19-D1+2-LY2875358 LC |
| 37 | 237 | CD19-D1+2-LY2875358 HC |
| 38 | 238 | LY2875358 LC-CD19-D1+2 |
| 39 | 239 | LY2875358 HC-CD19-D1+2 |
| 40 | 240 | Trastuzumab scFv (VH/VL)-CD19-D1+2 |
| 41 | 241 | Trastuzumab scFv (VH/VL)-CD19-D1+2- |
| | | hulgGFc |
| 42 | 242 | CD19-D1+2-Trastuzumab scFv (VH/VL) |
| 43 | 243 | CD19-D1+2-Trastuzumab scFv (VH/VL)- |
| | | hulgGFc |
| 46 | 246 | human CD69 promoter-tGFP |
| 47 | 247 | human TNFalpha promoter-tGFP |
| 48 | 248 | mouse CD25 promoter-tGFP |
| 49 | 249 | NFAT element × 6 promoter-tGFP |
| 50 | 250 | CD19-ECD-Panitumumab HC |
| 51 | 251 | CD19-ECD-LY2875358 HC |
| 52 | 252 | CD19-ECD-MOC31 scFv (VH/VL) |
| 53 | 253 | CD19-ECD-LY2875358-scFv (VH/VL) |
| 54 | 254 | CD19-ECD-Panitumumab scFv (VH/VL) |
| 55 | 255 | CD19-ECD-Trastuzumab scFv (VH/VL) |
| 56 | 256 | CD19-ECD-hulgGFc-Trastuzumab scFv |
| | | (VH/VL) |
| 57 | 257 | Her2-ECD-Panitumumab scFv (VH/VL) |
| 58 | 258 | Her2-D4-Panitumumab scFv (VH/VL) |
| 63 | 263 | CD19-ECD-Leu16 scFv (VH/VL) |
| 64 | 264 | CD22-D123-FMC63 scFv (VH/VL) |
| 65 | 265 | CD22-D123-Leu16 scFv (VH/VL) |
| 66 | 266 | CMV promoter-tGFP |
| 67 | 267 | CD19-ECD-anti-EGFRvIII scFv (VL/VH) |
| 68 | 268 | CD22-D123-anti-EGFRvIII scFv (VH/VL) |
| 71 | 271 | FMC63 CAR-19 construct Flag-tagged-1 |
| 72 | 272 | FMC63 CAR-19 construct Flag-tagged-2 |
| 73 | 273 | CD19 FMC63 CAR and CMV-#42 |
| 74 | 274 | CD19 FMC63 CAR and CD25 promoter- |
| | | #42 |
| 75 | 275 | CD19 FMC63 CAR and CD69 promoter- |
| | | #42 |
| 76 | 276 | CD19 FMC63 CAR and TNF promoter-#42 |
| 77 | 277 | CD19 FMC63 CAR and NFAT promoter- |
| | | #42 |
| 78 | 278 | Leu16 scFv (VH/VL)-hulgGFc |
| 79 | 279 | Leu16 scFv (VH/VL) |
| 80 | 280 | Leu16 scFv (VL/VH)-hulgGFc |
| 81 | 281 | Leu16 scFv (VL/VH) |
| 82 | 282 | CD19-D1+2-Leu16 scFv (VH/VL)-hulgGFc |
| 83 | 283 | CD19-D1+2-Leu16 scFv (VH/VL) |
| 84 | 284 | CD19-D1+2-Leu16 scFv (VL/VH)-hulgGFc |
| 85 | 285 | CD19-D1+2-Leu16 scFv (VL/VH) |
| 86 | 286 | CD19-D1+2-MOC31 scFv (VH/VL) |
| 87 | 287 | CD19-D1+2-Ly2875358 scFv (VH/VL) |
| 88 | 288 | CD19 D1+2-Panitumumab scFv (VH/VL) |
| 89 | 289 | C11D5.3 scFv (VL/VH) |
| 90 | 290 | C11D5.3 scFv (VH/VL) |
| 91 | 291 | CD19-D1+2-C11D5.3 scFv (VL/VH) |
| 92 | 292 | CD19-D1+2-C11D5.3 scFv (VH/VL) |
| 93 | 293 | CD19-D1+2-hulgGFc-Trastuzumab |
| | | (VH/VL) |
| 94 | 294 | Bispecific CD19-D1+D2-Trastuzumab scFv |
| | | (VH/VL)-Panitumumab scFv (VH/VL) |
| 95 | 295 | Bispecific CD19-D1+D2-Trastuzumab scFv |
| | | (VH/VL)-Panitumumab scFv (VL/VH) |
| 96 | 296 | Bispecific Trastuzumab scFv-Panitumumab scFv (VH/VL) |
| 97 | 297 | Bispecific Trastuzumab scFv- |
| | | Panitumumab scFv (VL/VH) |
| 98 | 298 | lentiviral CMV promoter-#42 |
| 99 | 299 | lentiviral CD25 promoter-#42 |
| 100 | 300 | lentiviral CD69 promoter-#42 |
| 101 | 301 | lentiviral TNFa promoter-#42 |
| 102 | 302 | lentiviral NFATx6 promoter-#42 |
| 103 | 303 | Trastuzumab scFv (VH/VL)-hulgGFc |
| 104 | 304 | CD19-D1+2-extended linker-Leu16 scFv |
| | | (VH/VL)-hulgGFc |
| 105 | 305 | CD19-D1+2-extended linker-Leu16 scFv |
| | | (VH/VL) |
| 106 | 306 | CD19-D1+2-hulgGFc-Leu16 scFv (VH/VL) |
| 107 | 307 | Leu16 scFv (VH/VL)-CD19-D1+2-hulgGFc |
| 108 | 308 | EF1a-#72-T2A-#42 |
| 109 | 309 | EF1a-#42-T2A-#72 |
| 110 | 310 | #98 EF1a promoter and CMV (variant) |
| 111 | 311 | #42 EF1a promoter (pCDH-EF1a) |
| 112 | 312 | CD19 full ECD |
| 113 | 313 | CD19-D1+2-Trastuzumab scFv (VH/VL) |
| 114 | 314 | CD19 D1+D2-MOC31 scFv (VH/VL) |
| 115 | 315 | CD19 D1+D2-LY2875358 scFv (VH/VL) |
| 116 | 316 | CD19 D1+D2-Panitumumab scFv |
| | | (VH/VL) |
| 117 | 317 | FMC63 CAR-Flag |
| 118 | 318 | FMC63 CAR |
| 119 | 319 | anti-CD19 FMC63 CAR heavy chain |
| 120 | 320 | anti-CD19 FMC63 CAR light chain |
| 121 | 321 | anti-FMC63 (anti-Id) scFv VH-VL- |
| | | Trastuzumab scFv-His |
| 122 | 322 | anti-FMC63 (anti-Id) scFv VL-VH- |
| | | Trastuzumab scFv-His |

[0106] The following examples are provided for illustrative purposes only and are not intended to limit the invention in any manner.

### EXEMPLIFICATION

### Example 1

### An Antigen-Activation Controlled Promoter Promotes Cytokine Release after Cellular Therapeutic Cells Encounter an Antigen (e.g., Tumor Cells or their Local Environment)

[0107] Cytokine support for cancer therapeutics has a long history (e.g. the systemic use of TNF, LTa, IFNs and IL-2). Inherent problems with systemic cytokine therapy include high dosage requirement, minimal efficacy, and toxicity (lethal in the case of TNF and LTa). Such toxicity limits the use of IL-12 and IL-15.

[0108] For example, systemic recombinant IL-12 induced multiple serious adverse effects, including renal and systemic toxicity. High-dose levels were linked to temporary immune suppression, which would be unfavorable for effective immunotherapy. (See, Leonard et al., Blood 1997;90:2541-8, and Colombo, MP et al., CytokineGrowth Factor Rev 2002;13:155-68, incorporated herein by reference. The majority of systemic IL-12 trials were associated with toxic adverse events and limited efficacy, since the cytokine did not reach the tumor site(s) in sufficient concentration (S Tugues, et al., 2015 Cell Death Differ 22: 237-246, incorporated herein by reference.

[0109] Recombinant IL-15 induces NK and CD8 cell mediated toxicities. Dose-limiting toxicities observed in patients receiving rIL-15 included grade 3 hypotension, thrombocytopenia, and elevations of ALT and AST, resulting in a suboptimal maximum-tolerated dose, having minimal clinical efficacy. (See, Conlon, K., et al., J. of Clinical Oncology Jan 1, 2015: 74-82, incorporated herein by reference).

[0110] These and similar studies illustrate the dose-limiting toxicity and minimal efficacy associated with the uncontrolled administration and systemic distribution of cytokines. Accordingly, an individual with cancer or suspected of having cancer (e.g., tumor) is administered with a composition that allows for the direct transduction of the tumor cells so that a fusion protein of a cytokines and a target. The administration can be intravenously or intra-tumorally.

### Example 2

### Release of Cytokines from Transduced Tumor Cells

[0111] CART cells, CAR NK cells, TCR T cells, TIL, allogeneic NK cells and autologous NK cells are engineered for prolonged release of IL-21 as a cytokine fusion protein with TAA. Expansion and effector differentiation is induced in CD8+ T cells, and NK cell activation and cytolytic activity is supported.

[0112] Engagement of activation signals rapidly secretes IL-15 under the control of the TNF promoter, which supports NK cell expansion (e.g., CAR NK, allogeneic NK cells, and autologous NK cells) or recruits NK cell promulgation in an anti-tumor response (e.g., CAR T, TCR, TIL). Alternatively, various combinations of cytokines expressed and promoters are used, and are expressed in a suitable manner (IL-2, IL-12, IL-36g, IFNg) as a fusion protein.

[0113] Sustained local production of an anti-TAA scFv antibody fused to IL-12 recruits immune cells to support and expand the anti-tumor immune response triggered by engagement with the CAR T cell or other cellular therapeutic.

### Example 3

### The targeting Method Utilizes a Single Chain Variable Fragment (scFv) Antibody (or Fragment thereof), or Secreted Heterodimer TCR Alpha/Beta or Gamma/Delta Chains are Fused to an Antibody-Drug Conjugate Target

[0114] The target is the polypeptide sequence, protein domain or domains recognized by the ADC, which is an antibody coupled to a toxin. ADC targets are the HER2 receptor, the CD30 cell surface protein, folate receptor alpha, and CD19, among many others.

[0115] The targeting method utilizes an scFv antibody or fragment thereof, and is fused to an antibody-drug conjugate target. Alternatively, a secreted heterodimer TCR alpha/beta or gamma/delta chain targeting method is used. Example antibody-drug conjugate target includes CD30, HER2, or ADCC antibody targets.

### Example 4

### The Targeting Method Utilizes a Single Chain Variable Fragment (scFv) Antibody (or Fragment thereof), or Secreted Heterodimer TCR Alpha/Beta or Gamma/Delta Chains are Fused to a Pro-Immune Response Agent

[0116] A “pro-immune response agent” is any agent capable of stimulating the immune response by stimulation cells comprising the immune response cell populations. Agents that stimulate immune responses directly include cytokines, the “danger signals” (DAMPs, PAMPs, TLR agonists etc.), agonist antibodies or ligands (e.g. anti-4-1BB, CD4OL, B7-1, and many others), inhibitors of immunosuppressive signals (antagonists of PD-1, PD-L1, CTLA4, Lag-3, TIM-3, ID01, adenosine receptor, TGFbeta, and many others)

[0117] The targeting method utilizes a scFv antibody (or fragment thereof), alternatively, the targeting method is a secreted heterodimer TCR alpha/beta or gamma/delta chain. In both targeting methods, the pro-immune response agent includes IL-2, IFNalpha, IL-12, IL-15, IL-21, any TLR agonist and any immune checkpoint antibody (or fragment thereof).

### Example 5

### The Targeting Method Utilizes a Single Chain Variable Fragment (scFv) Antibody (or Fragment thereof), or Secreted Heterodimer TCR Alpha/Beta or Gamma/Belta Chains Fused to Cell Recruiting Moieties

[0118] Another method for recruitment of immune effector cells is the development of bispecific T-cell Engagers (e.g. BiTEs) which consist of two scFvs connected by a linker. One arm is an anti-TAA scFv, and the second scFv binds to the CD3 subunit of the TCR complex and therefore triggers T cell activation. Importantly, BiTEs and related molecules (DARTS, diabodies, fCabs etc) elicit repeated rounds of tumor cell lysis by T cells at very low effector/ target (E/T) cell ratios. The cytotoxicity is mediated by membrane perforation and subsequent induction of granzymes and apoptosis, exactly the type of killing that one wished to elicit: in the anti-tumor setting. Normally, the affinity of the anti-TAA scFv tumor-associated antigen is much higher than that directed against CD3—this enforces specificity for the targeted tumor. Many BiTEs have been generated, including BiTEs that target CD19, EpCAM, HER2, carcinoembryonic antigen (CEA), ephrin A2 (EphA2), CD33, and melanoma-associated chondroitin sulfate proteoglycan (MCSP). Other BiTEs that are in clinical studies are composed of EpCAM, prostate-specific membrane antigen (PSNIA), or CEA-binding molecules combined with CD3-binding modules.

[0119] In some examples, the targeting method utilizes an scFv antibody (or fragment thereof), alternatively, the targeting method includes a secreted heterodimer TCR alpha/beta or gamma/delta chain. In both targeting methods, the cell recruiting moiety is fused to anti-CD16. In alternative examples, the cell recruiting moiety is fused to an anti-CD3 moiety, and utilizes the BITE® technology described herein.

### Example 6

### Transfection of a Tumor In Vivo using an HPV Pseudovirus with an ScFv-CD19 Fusion Protein in which the ScFv Binds the TAA Her2, and the Tumor is Killed by CD19-Directed CAR T Cells

[0120] HPV pseudovirus comprising an ScFv-CD19 fusion protein is injected IV to transduce tumor cells in a xenograft mouse model of breast cancer expressing Her2. The transduced tumors secrete the ScFv-CD19 fusion protein, resulting in coating of tumor cells with the ScFv-Cd19 fusion protein via ScFv binding to Her2. Addition of CD19-directed CAR T cells kills the tumor cells coated with CD19. CAR T cells directed to CD19 are made by standard methods.

### Example 7

### Transfection of a Tumor In Vivo using an AAV-Phage Chimeric Virus with an ScFv-CD19 Fusion Protein in which the ScFv Binds the TAA Her2, and the Tumor is Killed by CD19-Directed CAR T Cells

[0121] A chimeric AAV/phage virus is injected IV to transduce tumor cells in a xenograft mouse model of breast cancer expressing Her2. The transduced tumors secrete the ScFv-CD19 fusion protein, resulting in coating of tumor cells with the ScFv-CD19 fusion protein via ScFv binding to Her2. Addition of CD19-directed CAR T cells kills the tumor cells coated with CD19. The generation of CD19 directed CAR T cells is well established.

### Example 8

### Transfection of a Tumor In Vivo using an HPV Pseudovirus with an ScFv-CD30 Fusion Protein in which the ScFv Binds the TAA Her2, and the Tumor is Killed by a CD30-Targeted ADC

[0122] HPV pseudovirus comprising an ScFv-CD30 fusion protein is injected IV to transduce tumor cells in a xenograft mouse model of breast cancer expressing Her2. The transduced tumors secrete the ScFv-CD30 fusion protein, resulting in coating of tumor cells with the ScFv-CD30 fusion protein via ScFv binding to Her2. Addition of CD30-directed antibody-drug conjugate (ADC) kills the tumor cells coated with CD30.Adcetris is a commercially available ADC from Seattle Genetics.

### Example 9

### Transduction of Cells with AAV Viral Particles Encoding Fusion Proteins Results in Secreted Functional Fusion Proteins Capable of Directing CAR19 T Cell Targeting and Activation

[0123] The present Example demonstrates expression of fusion proteins from cells transduced with AAV viral particles encoding fusion proteins. Further, the present example demonstrates that the expressed fusion proteins are capable of being bound by the anti-CD19 antibody FMC63 and detected by an anti-His antibody binding to the C-terminal His tag. Once expressed the fusion proteins are able to activate CAR19 T cells in the presence of cells that are CD19 negative.

[0124] The following table lists the various constructs tested in this example:

| | | Amino Acid SEQ | Nucleotide SEQ ID |
|---|---|---|---|
| Construct # | Description | ID NO: | NO: |
| 113 | CD19-D1+2-Trastuzumab scFv | 113 | 313 |
| | (VH/VL) | | |
| 114 | CD19 D1+D2-MOC31 scFv | 114 | 314 |
| | (VH/VL) | | |
| 115 | CD19 D1+D2-LY2875358 scFv | 115 | 315 |
| | (VH/VL) | | |
| 116 | CD19 D1+D2-Panitumumab | 116 | 316 |
| | scFv (VH/VL) | | |

### Methods

[0125] A 12 well plate was seeded with either A431 or 293T cells around 4×10e5 cells/well in DMEM+10% FBS media. The following day, one well was counted to get an accurate count for the viral infections. Cells were infected with a multiplicity of infection (MOI) of 1×10⁶ or 5×10⁶. AAV2 viral particles were made by Vigene (Rockville, Md.). The viral particles were generated from plasmids where the inserts containing the CD19 D1+D2-scFv-His sequences were cloned into pAV-FH. The viral particles AAV-1 (CD19-D1+2-Trastuzumab scFv (VH/VL), SEQ ID NO:113), AAV-3 (CD19 D1+D2-MOC31 scFv (VH/VL), SEQ ID NO:114), AAV-5 (CD19 D1+D2-LY2875358 scFv (VH/VL), SEQ ID NO:115) and AAV-7 (CD19 D1+D2-Panitumumab scFv (VH/VL), SEQ ID NO:116) had titers of 8.39×10¹³, 1.51×10¹⁴, 3.03×10¹⁴ and 2.13×10¹⁴ GC/ml, respectively. Infections were done in 0.6ml/well DMEM+2% FBS where the virus was added directly into the media. Different concentrations of virus were used from 10 μl (aka “104” or “10e4”) to 5×10⁶ (aka “5×106” or “5×10e6”). The following day, the media was changed to DMEM+10%FBS and the incubation continued for 3 or 6 days.

### Elisa

[0126] Expression analysis was examined in the supernatant using an ELISA where anti-CD19 FMC63 was used for capture and anti-His used for detection. Briefly, 96 well plates (Pierce, Cat# 15041) were coated with 1.0 μg/ml reagent in 0.1 M carbonate, pH 9.5 for O/N at 4C. The plates were then blocked with 0.3% nonfat dry milk (NFD) in TBS (200 μl/well) for 1 hr at RT. Plates were then washed 3× with wash buffer (1× TBST: 0.1 M Tris, 0.5 M NaCl, 0.05% Tween20). Titrations were performed from undiluted cell culture supernatant or purified protein at 1.0 μg/ml with serial 3× dilutions, 100 μl per well and incubate for 1h at RT. Dilution buffer is 1% BSA in 1× TBS (0.1 M Tris, 0.5 M NaCl) followed by washing 3× with wash buffer. Secondary reagents were added (if needed) such as Biotinylated-reagents at 1 μg/ml concentration at RT for 1 hour. HRP-conjugated reagents were added at 1:2000, applied 100 μl per well, incubated at RT in dark for 1 hr. 100 μl 1-Step Ultra TMB-ELISA (Thermo Fisher, Prod#34028) was added per well. Plates were read at 405 nm when color had developed.

### XTT Cell Proliferation Assay (ATCC, Cat# 30-1011K)

[0127] An aliquot of the XTT reagent and the activation reagent was rapidly thawed at 37oC prior to use. 0.1 ml of activation reagent was then added to 5.0 ml of the XTT reagent. 50 μl of the activated—XTT solution was then added to each well. The plate was placed in the cell culture incubator for 2-4 hours and monitored for color development. The absorbance of the plate was read at wavelength 450 nm. The % cell death (aka cytotoxicity) was calculated as follows:

killing=[1-OD(experimental wells-corresponding number of T cells)/OD (tumor cells without T cell-medium)]×100

### Interferon Gamma Concentration Assay by ELISA

[0128] A 96 well plate (Pierce, product #15041) was coated with 1.0 μg/ml mouse anti-human IFNγ (BD Pharmingen, Cat# 551221) in 0.1 M carbonate buffer, pH 9.5, overnight at 4° C. The plate was blocked with 0.3% non-fat dry milk solution in tris-buffered saline (TBS) using 200 μl/well for 1 hour at room temperature. The plate was washed x3 with wash buffer (1× TBS/Tween: 0.1 M Tris, 0.5 M NaCl, 0.05% Tween20). 100 μl culture supernatant from the 24 hour or 48 hour culture plates (see above) were added to the ELISA plate. A titration of recombinant human IFNγ (Thermo Fisher, Cat# RIFNG100) was also performed in the same plate from 300 ng/ml with serial 3× dilutions to 2 pg/ml to generate a standard curve. The plate was then incubated for 1 hour at room temperature. The dilution buffer was 1× TBS (0.1 M Tris, 0.5 M NaCl) plus 1% BSA. The plate was washed x3 with wash buffer. Biotinylated mouse anti-human IFNγ (BD Pharmingen, Cat# 554550) was added at 1 μg/ml concentration and the plate was incubated at room temperature for 1 hour. The plate was washed again x3 with wash buffer. HRP-conjugated Streptavidin (Thermo Fisher, Cat# 21130) was added at a 1:2000 dilution from the stock, with 100 μl added per well. The plate was then incubated at room temperature for 1 hour in the dark. The plate was washed again x3 with wash buffer. 100 μl per well of 1-Step Ultra TMB-ELISA development solution (Thermo Fisher, Cat #34028) was added per well. The plate was read at wavelength 405 nm when color developed sufficiently.

### Results

[0129] FIGS. 2A-2C demonstrate expression of fusion proteins from transduced cells. FIG. 2A shows detection of fusion protein CD19-D1+2-Trastuzumab scFv (VH/VL) (AAV#1) is expressed after transduction of A431 or 293T cells with AAV viral particles encoding the fusion protein. The expressed fusion protein is capable of being bound by the anti-CD19 antibody FMC63 and detected by an anti-His antibody binding to the C-terminal His tag. FIG. 2B demonstrates detection of expression of fusion proteins AAV-3 (CD19 D1+D2-MOC31 scFv (VH/VL), SEQ ID NO:114), AAV-5 (CD19 D1+D2-LY2875358 scFv (VH/VL), SEQ ID NO:115) and AAV-7 (CD19 D1+D2-Panitumumab scFv (VH/VL), SEQ ID NO:116) resulting from transduction of 293T cells with AAV particles encoding the indicated fusion protein. FIG. 2C demonstrates detection of expression of fusion protein AAV-3 (CD19 D1+D2-MOC31 scFv (VH/VL) resulting from transduction of A431 cells with AAV particles encoding the fusion protein.

[0130] FIGS. 3A and 3B show a summary of results of the IFNγ ELISA measuring induction of IFNγ upon incubation of CAR19 T cells (Promab) with AAV-1-expressed supernatant and BT474 cells. FIG. 3A shows the results of the IFNγ ELISA at 24 hrs at a 10:1 effector:target ratio. FIG. 3B shows the results of the IFNγ ELISA at 48 hrs at a 10:1 effector:target ratio.

[0131] FIGS. 4A-4C show induction of cytotoxicity upon incubation of CAR19 T cells (Promab) with AAV-1-expressed supernatant and BT474 cells. FIG. 4A shows summary XTT-cytotoxicity results for 2:1 effector:target ratio after 24 hours. FIG. 4B shows summary XTT-cytotoxicity results for 2:1 effector:target ratio after 48 hours. FIG. 4C shows summary XTT-cytotoxicity results for 10 :1 effector:target ratio after 48 hours. These results demonstrate that AAV transduction of cells (e.g. tumor cells) can result in expression of functional fusion proteins which can direct CAR19 T cell activation and cytotoxicity.

### Example 10

### Transduction of Cells with AAV Viral Particles Encoding Anti-Idiotype (Anti-Id) scFv/scFv Fusion Proteins Results in Secreted Functional Fusion Proteins Capable of Directing CAR19 T Cell Targeting and Activation

[0132] Construction and Expression of Trastuzumab scFv-Anti-Id Fusion Proteins

[0133] This example illustrates that an anti-idiotype scFv (136.20.1 scFv, which recognizes the scFv domain of the mouse anti-human antibody FMC63 (see, e.g., Jena B, et al. (2013) Chimeric Antigen Receptor (CAR)-Specific Monoclonal Antibody to Detect CD19-Specific T Cells in Clinical Trials. PLoS ONE 8(3): e57838; US 2016/0096902))can be fused to scFvs that bind to HER2, an antigen expressed on solid tumors and their metastases, e.g., the anti-Her2 scFv that is derived from trastuzumab/hu4D5v8 (e.g. from PDB database (1N8Z) and the Drug Bank database (AC. DB00072), see also Cho HS, Mason K, Ramyar KX, Stanley AM, Gabelli SB, Denney DW, Jr, et al. Structure of the extracellular region of HER2 alone and in complex with the Herceptin Fab. Nature. 2003;421:756-760), or of other anti-Her2 scFvs whether known in the art or newly discovered.

[0134] Trastuzumab scFv/anti-Id scFv fusion proteins containing 136.20.1 anti-idiotype scFv and trastuzumab scFv is created using the coding sequences for each scFv, with an appropriate signal sequence, linked together using G4S or other robust linker sequences as needed to allow each VH/VL pair to fold, and also to retain the structural integrity of each scFv by preventing interaction between the two scFv, using methods well known in the art.

[0135] The trastuzumab scFv-anti-Id scFv fusion proteins are produced in a variety of configurations, where each scFv is provided in tandem as a VH/VL pair, and in the N- or C-terminal position. For example, trastuzumab scFv-anti-Id scFv fusion proteins include N-terminal 136.20.1 scFv (VH/VL or VL/VH) and C-terminal trastuzumab scFv (VH/VL or VL-VH) and also N-terminal trastuzumab scFv (VH/VL or VL/VH) and C-terminal 136.20.1 scFv (VH/VL or VL/VH).

[0136] A His-tag is used to monitor protein expression. The His-tag is N-terminal or C-terminal in placement. A FLAG-tag is used as needed. A biotin label is used as needed. Other tags and labels are used as needed.

[0137] The assembled sequences are cloned into expression systems for analysis. For example, the sequences are cloned into the pcDNA-1 vector. The cloned sequences are expressed in mammalian cells. For example, 293T cells are transfected using vector DNA and Lipofectamine 2000® (Invitrogen). Some transfections are for temporary protein production (transient) while some are for cell line development (stable). Optimized sequences are cloned into retroviral, lentiviral or mRNA systems suitable for large scale transduction of human T cells. Protein expression level and quality is determined by Western blot analyses, immunoprecipitation, ELISA analyses, chromatography and/or additional methods as needed.

Trastuzumab scFv-Anti-Id Fusion Proteins are Recognized by FMC63 and by HER2

[0138] The ability of the trastuzumab scFv-anti-Id scFv fusion proteins to bind to the distinct ligands is determined using a variety of methods to demonstrate specific binding. ELISA plates are coated with FMC63 antibody or with streptavidin/biotinylated-HER2 to bind to 136.20.1 scFv and trastuzumab scFv, respectively. After binding is allowed to occur, the plates are gently washed to remove unbound materials. Anti-HIS-antibody coupled to horseradish peroxidase (HRP) is used to detect the bound fusion protein. In another iteration, an ELISA plate is coated with anti-HIS antibody to capture the fusion protein, and biotinylated HER2/streptavidin-HRP is used to detect. In another iteration, the ELISA plates is coated with FMC63 antibody and biotinylated HER2/streptavidin-HRP is used to detect. Other iterations are utilized as needed. The ELISAs are used to monitor expression of transient transfections, stable transfections, and cell transductions.

Trastuzumab scFv-Anti-Id Fusion Proteins Bind to HER2 Positive BT474 Cells

[0139] The trastuzumab scFv-anti-Id scFv fusion proteins are shown to bind to target (HER2 positive) tumor cells using standard techniques known in the art, e.g. flow cytometry, ELISA, etc. Trastuzumab scFv-anti-Id scFv fusion proteins are incubated with BT474 cells or other human tumor cells or cell lines that are HER2-positive. After incubation the cells are gently washed to remove unbound materials. The bound trastuzumab scFv-anti-Id scFv fusion proteins are detected using fluorescently labeled anti-HIS antibody or FMC63 antibody.

CAR19 T Cells are Redirected to HER2 Positive Tumor Cells via the Trastuzumab scFv-Anti-Id Fusion Protein, and in a Manner that Successfully Activates the CAR19 T Cells so that they lyse the Tumor Cells

[0140] Trastuzumab scFv-anti-Id scFv fusion proteins are shown to induce CAR T cell activity using cytokine release and cytotoxicity assays. Trastuzumab scFv-anti-Id scFv fusion proteins are incubated with BT474 cells or other human tumor cells or cell lines that are HER2-positive. Trastuzumab scFv-anti-Id scFv fusion proteins are in the form of a soluble purified protein, or are in a cell culture supernatant, or are secreted from a cell in the culture, for example a CAR T cell that has an FMC63-based CAR domain. FMC63-based CAR T cells are added to the culture if they are not already present. The coculture is allowed to incubate, for example between 4 hours and 72 hours. At an optimal time, supernatants are collected for ELISA analyses, for example, for IL-2 and IFN-gamma. At an optimal time the cells are analyzed using a cytotoxicity assay, for example an XTT assay. The assays demonstrate that trastuzumab scFv-anti-Id scFv fusion proteins redirect FMC63 based CART cells to lyse target HER2-positive tumors cells, causing their cytotoxicity.

Construction and Expression of Various scFv-Anti-Id Fusion Proteins

[0141] The scFv from the 136.20.1 anti-idiotype antibody recognizing FMC63 can be fused to many other scFv directed to diverse tumor antigens and investigated for functionality in the same manner as the trastuzumab scFv fusion. In another example, the 136.20.1 scFv is fused to a tumor targeting scFv, for example an scFv that targets CD20, an antigen that is expressed on B cell malignancies, e.g., the anti-CD20 scFv as is disclosed as a component of SEQ ID NO: 65, SEQ ID NO: 78, SEQ ID NO: 79, SEQ ID NO: 80, SEQ ID NO: 81, SEQ ID NO: 82, SEQ ID NO: 83, SEQ ID NO: 84, SEQ ID NO: 85, SEQ ID NO: 125, or SEQ ID NO: 126 or other variations of the anti-CD20 scFv or of other anti-CD20 scFvs whether known in the art or newly discovered. In a further example, the 136.20.1 anti-idiotype scFv is fused to an scFv that targets BCMA, an antigen that is expressed on plasma cell malignancies including multiple myeloma, e.g. the anti-BCMA scFv as is disclosed as a component of SEQ ID NO: 89, SEQ ID NO: 90, SEQ ID NO: 91, SEQ ID NO: 92, SEQ ID NO: 119, or SEQ ID NO: 120 or other variations of this anti-BCMA scFv or of other anti-BCMA scFvs whether known in the art or newly discovered. In another example, the 136.20.1 anti-idiotype scFv is fused to a tumor targeting scFv, for example, an scFv that targets EGFR, an antigen expressed on solid tumors and their metastases, e.g., the anti-EGFR scFv that is disclosed within SEQ ID NO: 21, SEQ ID NO: 22, SEQ ID NO: 54, SEQ ID NO: 57, SEQ ID NO: 58, SEQ ID NO: 88, SEQ ID NO: 94, SEQ ID NO: 95, SEQ ID NO: 96, SEQ ID NO: 97, or other variations of the anti-EGFR scFv or of other anti-EGFR scFvs whether known in the art or newly discovered.

### Cell Transduction

[0142] A 12 well plate is seeded with either A431 or 293T cells around 4×10e5 cells/well in DMEM+10% FBS media. The following day, one well is counted to get an accurate count for the viral infections. Cells are infected with a multiplicity of infection (MOI) of 1×10⁶ or 5×10⁶. AAV2 viral particles are made by Vigene (Rockville, MD). The viral particles are generated from plasmids where the inserts containing sequences encoding the scFv-anti-Id fusion proteins (that include a HIS tag on the scFv) are cloned into pAV-FH. The viral particles are titered using standard methods. Infections are done in 0.6ml/well DMEM+2% FBS where the virus is added directly into the media. Different concentrations of virus are used from approx 10⁴ (aka “104” or “10e4”) to 5×10⁶ (aka “5×106” or “5×10e6”). The following day, the media is changed to DM EM+10%FBS and the incubation continued for 3 or 6 days.

### Elisa Analysis

[0143] Expression analysis is examined in the supernatant using an ELISA where anti-CD19 FMC63 is used for capture and anti-His used for detection. Briefly, 96 well plates (Pierce, Cat# 15041) are coated with 1.0 μg/ml reagent in 0.1 M carbonate, pH 9.5 for O/N at 4C. The plates are then blocked with 0.3% nonfat dry milk (NFD) in TBS (200 μl/well) for 1 hr at RT. Plates are then washed 3× with wash buffer (1× TBST: 0.1 M Tris, 0.5 M NaCl, 0.05% Tween20). Titrations are performed from undiluted cell culture supernatant or purified protein at 1.0 μg/ml with serial 3× dilutions, 100 μl per well and incubated for 1h at RT. Dilution buffer is 1% BSA in 1× TBS (0.1 M Tris, 0.5 M NaCl) followed by washing 3× with wash buffer. Secondary reagents are added (if needed) such as Biotinylated-reagents at 1 μg/ml concentration at RT for 1 hour. HRP-conjugated reagents are added at 1:2000, applied 100 μl per well, incubated at RT in dark for 1 hr. 100 μl 1-Step Ultra TMB-ELISA (Thermo Fisher, Prod#34028) is added per well. Plates are read at 405 nm when color has developed. The expressed fusion proteins are capable of being bound by the anti-CD19 antibody FMC63 and detected by an anti-His antibody.

### XTT Cell Proliferation Assay (ATCC, Cat# 30-1011K)

[0144] An aliquot of the XTT reagent and the activation reagent is rapidly thawed at 37° C. prior to use. 0.1 ml of activation reagent is then added to 5.0 ml of the XTT reagent. 50 μl of the activated—XTT solution is then added to each well. The plate is placed in the cell culture incubator for 2-4 hours and monitored for color development. The absorbance of the plate is read at wavelength 450 nm. The % cell death (aka cytotoxicity) is calculated as follows:

% killing=[1-OD(experimental wells-corresponding number of T cells)/OD (tumor cells without T cell-medium)]×100

[0145] Expressed fusion proteins are capable of directing CAR19 T cell activation and cytotoxicity upon incubation of supernatant with CAR19 T cells and BT474 cells.

### Interferon Gamma Concentration Assay by ELISA

[0146] A 96 well plate (Pierce, product #15041) is coated with 1.0 μg/ml mouse anti-human IFNγ (BD Pharmingen, Cat# 551221) in 0.1 M carbonate buffer, pH 9.5, overnight at 4° C. The plate is blocked with 0.3% non-fat dry milk solution in tris-buffered saline (TBS) using 200 μl/well for 1 hour at room temperature. The plate is washed x3 with wash buffer (1× TBS/Tween: 0.1 M Tris, 0.5 M NaCl, 0.05% Tween20). 100 μl culture supernatant from the 24 hour or 48 hour culture plates (see above) are added to the ELISA plate. A titration of recombinant human IFNγ (Thermo Fisher, Cat# RIFNG100) is also performed in the same plate from 300 ng/ml with serial 3× dilutions to 2 pg/ml to generate a standard curve. The plate is then incubated for 1 hour at room temperature. The dilution buffer is 1× TBS (0.1 M Tris, 0.5 M NaCl) plus 1% BSA. The plate is washed x3 with wash buffer. Biotinylated mouse anti-human IFNγ (BD Pharmingen, Cat# 554550) is added at 1 μg/ml concentration and the plate is incubated at room temperature for 1 hour. The plate is washed again x3 with wash buffer. HRP-conjugated Streptavidin (Thermo Fisher, Cat# 21130) is added at a 1:2000 dilution from the stock, with 100 μl added per well. The plate is then incubated at room temperature for 1 hour in the dark. The plate is washed again x3 with wash buffer. 100 μl per well of 1-Step Ultra TMB-ELISA development solution (Thermo Fisher, Cat #34028) is added per well. The plate is read at wavelength 405 nm when color has developed sufficiently. Expressed fusion proteins are capable of inducing IFNγ upon incubation of supernatant with CAR19 T cells and BT474 cells.

### Example 11

### Expression and Functional Testing of anti-FMC63 anti-Is scFv

[0147] The following table lists the various constructs tested in this example:

| | | Amino Acid | Nucleotide |
|---|---|---|---|
| | | SEQ ID | SEQ ID |
| Construct # | Description | NO: | NO: |
| 140 | FMC63 CAR-Flag | 117 | 317 |
| 150 | FMC63 CAR | 118 | 318 |
| 151 | anti-CD19 FMC63 | 119 | 319 |
| | CAR heavy chain | | |
| 152 | anti-CD19 FMC63 | 120 | 320 |
| | CAR light chain | | |
| 171 | anti-FMC63 (anti-Id) | 121 | 321 |
| | scFv VH-VL- | | |
| | Trastuzumab scFv- | | |
| | His | | |
| 172 | anti-FMC63 (anti-Id) | 122 | 322 |
| | scFv VL-VH- | | |
| | Trastuzumab scFv- | | |
| | His | | |

### Cloning and Expression of the Anti-FMC63 Antibody

[0148] The amino sequence for the variable heavy and light chains for the anti-FMC63 antibody, 136.20.1, was obtained from Cooper et al. patent WO2014190273 Al. The sequences were back translated and used to generate the full antibody chains. For the heavy chain, the sequence of the leader and constant domains were obtained from a murine IgG2a antibody (UniProt P01863). For the kappa light chain, the signal sequence and constant domains were obtained from Uniprot P01863. The nucleotide sequence of the anti-CD19 FMC63 CAR heavy chain (SEQ ID NO: 319; construct #151) and light chain (SEQ ID NO: 320; construct #152) were chemically synthesized by GenScript and cloned into the vector pcDNA3.1(+) (#151) or pcDNA3.1(+)hygro (#152). Equal amounts of the plasmids were co-transfected into 293T cells using lipofectamine 2000 (Invitrogen/Thermo Fisher Prod#11668019) following the manufacturers instructions; supernatants were harvested after 48hr. For the large-scale transfections, 293T cells were seeded into T175 flasks and transfected with lipofectamine 2000, as above, when the cells reached about 80% confluency. Cells were cultured in bovine FBS with low serum IgG (VWR). Supernatants were harvested every 3-4 days.

### Elisa Method

[0149] A 96 well plate (Pierce, Cat# 15041) was coated with 1.0 ug/ml goat anti-mlgG in 0.1 M carbonate, pH 9.5 for O/N at 4C. The plate was blocked with 0.3% non-fat milk in Tris buffered saline (TBS 0.1 M Tris, 0.5 M NaCl) (200 ul/well) for 1 hr at RT. Then washed 3× with wash buffer (1× TBST: 0.1 M Tris, 0.5 M NaCl, 0.05% Tween20). The cell culture sup was titrated from 50× dilution down with 3× dilutions,100 ul was added per well and incubated for 1h at RT. Dilution buffer is 1% BSA in 1× TBS. The plate was washed 3× with wash buffer then 100 ul per well HRP-goat anti-mlgG at 1:2000 was applied and incubated at RT in dark for 1 hr. Then 100 ul of 1-Step Ultra TMB-ELISA from Thermo Fisher, Prod#34028 was added per well and the plate was read at 405 nm when color developed.

CAR expression

[0150] 293T cells were transfected with an anti-CD19 FMC63 CAR vector (SEQ ID NO: 317; construct #140). The CAR sequence (FMC63 VL-VH-Flag-CD28 linker/transmembrane/intracellular domain (ICD)-4-1BB ICD-CD3z ICD) was synthesized by ProMab Biotechnologies. The CAR insert was then cloned into a modified form of the System Biosciences vector pCDH-EF1a to generate construct #140 (SEQ ID NO: 317). The vector were transiently transfected into 293T cells using 2.5ug of DNA and 10 ul of lipofectamine 2000 (Invitrogen/Thermo Fisher). After ˜48hrs, the cells were harvested and resuspended in FACS buffer (1%I3SA, 0.1% sodium azide in PBS). CAR transfected cells (2.5×10\hat{ }5) were incubated with anti-Flag (1 ug/test) for 30 min at 4° C., spun and washed twice with FACS buffer, then followed by incubation with anti-rabbit IgG-APC for 30 min at 4° C. Cells were spun and washed as above, then fixed with 1% PFA in PBS. Fixed cells were analyzed on Accuri 6 for CAR expression (Flag positive).

### Cell Binding

[0151] Cells transfected with construct #140 (SEQ ID NO: 317) (2.5×10\hat{ }5 in 50 ul) were incubated with 50 u1 sup or purified (5 ug/ml as final conc.) protein of constructs#151/#152 (SEQ ID NO: 319/ SEQ ID NO: 320) for 30 min at 4° C., spun and washed twice with FACS buffer. This was followed by another incubation with anti-mouse Fc gamma-PE for 30 min at 4° C. Cells were spun and washed as above, and fixed with 1% PFA in PBS. Fixed cells were analyzed on Accuri 6 for CAR expression binding (PE positive).

[0152] FIG. 5 confirms the secretion of anti-FMC63 antibody by detection of the presence of anti-FMC63 heavy and light chain in supernatnats of transfected 293T cells. Further, the secreted anti-FMC63 antibody binds CAR19 containing an FMC63 domain. FIG. 6A and demonstrates that the CD19 CAR construct is expressed on the surface of transfected 293T cells (#140). FIG. 6B demonstrates binding of the anti-FMC63 anti-Id scFv to the CD19 CAR construst.

### Example 12

### Expression and Functional Testing of Trastuzumab scFv-Anti-Id scFv Fusion Proteins

### Cloning and Expression of Constructs #171 and #172 (SEQ ID NO: 321 and SEQ ID NO: 322, Respectively)

[0153] Constructs were generated to express the anti-FMC63 scFv-Trastuzumab scFv fusion proteins with two orientations of the heavy and light variable domains of anti-FMC63. Construct #171 (SEQ ID NO: 121) contains anti-FMC63 VH-linker-VL-linker-Trastuzumab scFv-His and construct #172 (SEQ ID NO: 122) contains the anti-FMC63 in the VL-linker-VH arrangement. The sequences were chemically synthesized by GenScript and cloned into pcDNA3.1(+) hygro. Supernatants containing the bispecific scFvs were produced by transfecting 293T cells using lipofectamine 2000 (Invitrogen/Thermo Fisher). The supernatants were harvested after 72hrs by spinning for 3 min at 12k rpm at 4C.

### Elisa Method

[0154] A 96 well plate (Pierce, Cat# 15041) was coated with 1.0 ug/ml Her2-hFc (plate#1) (Acrobiosystems, Cat#HE2-H5253) or FMC63 (plate#2) (NOVUS, Cat#NBP2-527160) in 0.1 M carbonate, pH 9.5 for O/N at 4C. The plates were blocked with 0.3% non-fat milk in TBS (200 ul/well) for 1 hr at RT. The plate was washed 3× with wash buffer (1× TBST: 0.1 M Tris, 0.5 M NaCl, 0.05% Tween20). The cell culture sup was titrated from no dilution down with 3 fold dilutions; the purified construct #42 protein (LakePharma) was started with 1 ug/ml down with 3 fold dilutions. Next, 100 ul was added per well and incubated for 1h at RT. Dilution buffer is 1% BSA in 1× TBS (0.1 M Tris, 0.5 M NaCl). The plates were washed 3× with wash buffer. For the plate#1, 100 ul of 1 ug/ml FMC63 was added to each well for 1 hr at RT and followed by 100 ul HRP-anti-mlgG at 1:2000. For plate#2, 100 ul HRP-anti-his at 1:2000 was applied per well and incubated for 1 hr at RT. For the final step, 100 ul 1-Step Ultra TMB-ELISA from Thermo Fisher, Prod#34028 was added per well and plates were read at 405 nm when color developed.

### Detection of Binding to Her2-Positive Target Cells

[0155] Supernatant (100u1) from 293T cells, transfected with constructs #171 or #172, was incubated with 50u1 (2×10e5) SKOV-3 luciferase cells (Cell Biolabs, Inc. #AKR232) on ice for 30 min. The samples were spun, washed 2× with FACS buffer (1%BSA, 0.1% sodium azide in PBS) and then incubated with anti-His tag-PE (5ul/sample, R&D systems #IC050P) on ice for 30 min. The cells were spun, washed 2× with FACS buffer and fixed with 1% PFA in PBS. Fixed cells were analyzed on Accuri 6 for anti-id-Trastuzumab scFv-His binding. The presence of Her2 on the SKOV-3 cells was determined by staining 2×10e5 cells with 1u1/sample anti-Her2 (Novus #NBP2-33064PE) for 30 min on ice, spun, washed 2× with FACS buffer, fixed and read as above. An anti-murine IgG2a-PE antibody 1u1/test (Thermo Fisher #SA1-120-82) was used as a control.

[0156] FIGS. 7A-C further demonstrate Trastuzumab scFv/anti-ld scFv fusion proteins containing 136.20.1 anti-idiotype scFv and trastuzumab scFv secreted from transfected 293T cells bind both FMC63 (FIG. 7A) and Her2 (FIG. 7B). Additionally, Trastuzumab scFv/anti-ld scFv fusion proteins, constructs #171 and #172, are capable of recognizing Her2 expressed on SKOV3 cells. FIG. 7C demonstrates binding of a CD19 expressing construct (#42) with the FMC63 coated plate as a control.

[0157] FIG. 8A demonstrates Her2 expression on SKOV3 cells and FIG. 8B demonstrates binding to the SKOV3-Her2 cells by the Trastuzumab scFv/anti-ld scFv fusion protein.

### Example 13

### CAR19 T Cell Targeting and Activation by Trastuzumab scFv-Anti-Id scFv Fusion Proteins

### SKOV3-Her2-Luc Killing Assay

[0158] Supernatant from cells transfected with #171 (concentration=0.15ug/ml), starting at 0.075ug/ml was titrated down in 3× serial dilution in RPMI +10%FBS (no antibiotics) medium for 8 points. Five replicates were done per dilution. SKOV3-Her2-Luc cells were seeded at 1×10e4/100u1 RPMI +10% FBS (no antibiotics)/well in a solid white plate. The cells were allowed to settle for ˜2hrs and then spun out and the supernatant removed. Next 50 ul of the 3× serial diluted #171 containing supernatant was added to SKOV3 cells. Then, 50 ul of CAR T cells #150 (SEQ ID NO:318) (5×10e4) was added (5 CART: 1 SKOV3 ratio) and the plate was incubated at 37° C. for 48hr. The sup was collected and the cells washed 2× with PBS. 20 ul 1× lysis buffer from Luciferase assay system kit, Promega, Fisher CAT# PR-E1500 was added into plate. The plate was placed into the luminometer with injector (Glomax Multi Detection System form Promega). The injector adds 100 ul of Luciferase assay reagent per well, then the well is read immediately. The plate is advanced to the next well for a repeat of the inject-then-read process.The % killing was determined for each concentration by dividing it by the RLU (relative luciferase units) of the target cells only using the equation 1-RLU sample/RLU target cell x 100%.

### IFN Gamma ELISA Method

[0159] A 96 well plate (Pierce, Cat# 15041) was coated with 2.0 ug/ml anti-INFg NlB42 (BD Pharmingen, cat#551221 through Fisher) at 100 ul in 0.1 M carbonate, pH9.5 for O/N at 4C. The plate was then blocked with 0.3% NF milk in TBS (200 ul/well) for 1 hr at RT and wash 3× with wash buffer 200 ul/well (1× TBST: 0.1 M Tris, 0.5 M NaCl, 0.05% Tween20). Next, 100 ul cell culture sup were transferred on the plate from the killing assay post 24 h and 48 h on to the plate and incubated for 1 h at RT. The interferon gamma (INFg) standard (recombinant human interferon gamma from Thermo Fisher, cat#RIFNG100) was prepared at starting concentration at 0.1 ug/ml and 3× series dilution to 1pg/ml and then 100 ul was added per well and incubated for 1h at RT. The dilution buffer is 1% BSA in 1× TBS (0.1 M Tris, 0.5 M NaCl). The plate was then washed 3× with wash buffer and biotinylated-mouse anti-human INFg (BD Pharmingen, cat# 554550 through Fisher) was added at 1 ug/ml concentration at RT for 1 hour. The plate was washed 3× with wash buffer and HRP-conjugated SA (Pierce high sensitivity Streptavidin-HRP: Thermo Fisher, Cat# 21130) was added at 1:2000; it was applied at 100 ul per well and incubated at RT in the dark for 1 hr. The plate was washed again 3× with wash buffer and 100 ul 1-Step Ultra TMB-ELISA from Thermo Fisher, Prod#34028 was added per well. The plate was read at 405 nm when the color developed.

[0160] The results of the luciferase release killing assay are shown in FIG. 9. The results demonstrate that Trastuzumab scFv/anti-ld scFv fusion proteins successfully redirected the targeting activity of the CAR19 T cell to kill a Her2-positive (and CD19-negative) cell in a fusion protein dose dependent manner. FIGS. 10A and 10B demonstrate the calculated cytotoxicity and EC50, respectively, of the CAR19 T cell killing as redirected by the Trastuzumab scFv/anti-ld scFv fusion proteins. A summary of the IFNg ELISA results is shown in FIG. 11.

[0161] The specificity of redirected killing by Trastuzumab scFv/anti-ld scFv fusion proteins is further demonstrated by comparison to control protiens lacking an anti-Id scFv portion. FIGS. 12A and 12B demonstrate that incubation of CAR19 T cells with a a Her2-positive (and CD19-negative) cell and an anti-Her2 protein (construct #16) using assays as described above does not result in killing whereas a Trastuzumab scFv/anti-ld scFv fusion protein does redirect killing of the Her2 positive cell by a CAR19 T cell. Further, FIG. 13 demonstrates that when the target cell (H929) lacks Her2 no redirected killing by the CAR19 T cell occurs.

### Equivalents

[0162] Those skilled in the art will recognize, or be able to ascertain using no more than routine experimentation, many equivalents to the specific embodiments of the invention described herein. The scope of the present invention is not intended to be limited to the above Description, but rather is as set forth in the following claims:

### Listing of Amino Acid Sequences

SEQ ID NO. 1
MEFGLSWVFLVALFRGVQCQVQLQESGPGLVKPSETLSLTCTVSGGSVSSGDYYWTWIRQSPGKGLEWIGHIYYSGNTNYNPSLK
SRLTISIDTSKTQFSLKLSSVTAADTAIYYCVRDRVTGAFDIWGQGTMVTVSSASTKGPSVFPLAPCSRSTSESTAALGCLVKDY
FPEPVTVSWNSGALTSGVHTFPAVLQSSGLYSLSSVVTVPSSNFGTQTYTCNVDHKPSNTKVDKTVERKCCVECPPCPAPPVAGP
SVFLFPPKPKDTLMISRTPEVTCVVVDVSHEDPEVQFNWYVDGVEVHNAKTKPREEQFQSTFRVVSVLTVVHQDWLNGKEYKCKV
SNKGLPAPIEKTISKTKGQPREPQVYTLPPSREEMTKNQVSLTCLVKGFYPSDIAVEWESNGQPENNYKTTPPMLDSDGSFFLYS
KLTVDKSRWQQGNVFSCSVMHEALHNHYTQKSLSLSPG
SEQ ID NO. 2
MPPPRLLFFLLFLTPMEVRPEEPLVVKVEEGDNAVLQCLKGTSDGPTQQLTWSRESPLKPFLKLSLGLPGLGIHMRPLAIWLFIF
NVSQQMGGFYLCQPGPPSEKAWQPGWTVNVEGSGGGGSGGGGSGGGGSDIQMTQSPSSLSASVGDRVTITCQASQDISNYLNWYQ
QKPGKAPKLLIYDASNLETGVPSRFSGSGSGTDFTFTISSLQPEDIATYFCQHFDHLPLAFGGGTKVEIKRTVAAPSVFIFPPSD
EQLKSGTASVVCLLNNFYPREAKVQWKVDNALQSGNSQESVTEQDSKDSTYSLSSTLTLSKADYEKHKVYACEVTHQGLSSPVTK
SFNRGEC
SEQ ID NO. 3
MPPPRLLFFLLFLTPMEVRPEEPLVVKVEEGDNAVLQCLKGTSDGPTQQLTWSRESPLKPFLKLSLGLPGLGIHMRPLAIWLFIF
NVSQQMGGFYLCQPGPPSEKAWQPGWTVNVEGSGGGGSGGGGSGGGGSQVQLQESGPGLVKPSETLSLTCTVSGGSVSSGDYYWT
WIRQSPGKGLEWIGHIYYSGNTNYNPSLKSRLTISIDTSKTQFSLKLSSVTAADTAIYYCVRDRVTGAFDIWGQGTMVTVSSAST
KGPSVFPLAPCSRSTSESTAALGCLVKDYFPEPVTVSWNSGALTSGVHTFPAVLQSSGLYSLSSVVTVPSSNFGTQTYTCNVDHK
PSNTKVDKTVERKCCVECPPCPAPPVAGPSVFLFPPKPKDTLMISRTPEVTCVVVDVSHEDPEVQFNWYVDGVEVHNAKTKPREE
QFQSTFRVVSVLTVVHQDWLNGKEYKCKVSNKGLPAPIEKTISKTKGQPREPQVYTLPPSREEMTKNQVSLTCLVKGFYPSDIAV
EWESNGQPENNYKTTPPMLDSDGSFFLYSKLTVDKSRWQQGNVFSCSVMHEALHNHYTQKSLSLSPG
SEQ ID NO. 4
METDTLLLWVLLLWVPGSTGDIQMTQSPSSLSASVGDRVTITCQASQDISNYLNWYQQKPGKAPKLLIYDASNLETGVPSRFSGS
GSGTDFTFTISSLQPEDIATYFCQHFDHLPLAFGGGTKVEIKRTVAAPSVFIFPPSDEQLKSGTASVVCLLNNFYPREAKVQWKV
DNALQSGNSQESVTEQDSKDSTYSLSSTLTLSKADYEKHKVYACEVTHQGLSSPVTKSFNRGEC
SEQ ID NO. 5
METDTLLLWVLLLWVPGSTGDIQMTQSPSSLSASVGDRVTITCQASQDISNYLNWYQQKPGKAPKLLIYDASNLETGVPSRFSGS
GSGTDFTFTISSLQPEDIATYFCQHFDHLPLAFGGGTKVEIKRTVAAPSVFIFPPSDEQLKSGTASVVCLLNNFYPREAKVQWKV
DNALQSGNSQESVTEQDSKDSTYSLSSTLTLSKADYEKHKVYACEVTHQGLSSPVTKSFNRGECDKTHTSPPSPAPEAAGGPSEV
RPEEPLVVKVEEGDNAVLQCLKGTSDGPTQQLTWSRESPLKPFLKLSLGLPGLGIHMRPLAIWLFIFNVSQQMGGFYLCQPGPPS
EKAWQPGWTVNVEGSG
SEQ ID NO. 6
MEFGLSWVFLVALFRGVQCQVQLQESGPGLVKPSETLSLTCTVSGGSVSSGDYYWTWIRQSPGKGLEWIGHIYYSGNTNYNPSLK
SRLTISIDTSKTQFSLKLSSVTAADTAIYYCVRDRVTGAFDIWGQGTMVTVSSASTKGPSVFPLAPCSRSTSESTAALGCLVKDY
FPEPVTVSWNSGALTSGVHTFPAVLQSSGLYSLSSVVTVPSSNFGTQTYTCNVDHKPSNTKVDKTVERKCCVECPPCPAPPVAGP
SVFLFPPKPKDTLMISRTPEVTCVVVDVSHEDPEVQFNWYVDGVEVHNAKTKPREEQFQSTFRVVSVLTVVHQDWLNGKEYKCKV
SNKGLPAPIEKTISKTKGQPREPQVYTLPPSREEMTKNQVSLTCLVKGFYPSDIAVEWESNGQPENNYKTTPPMLDSDGSFFLYS
KLTVDKSRWQQGNVFSCSVMHEALHNHYTQKSLSLSPGGGGGSGGGGSGGGGSEVRPEEPLVVKVEEGDNAVLQCLKGTSDGPTQ
QLTWSRESPLKPFLKLSLGLPGLGIHMRPLAIWLFIFNVSQQMGGFYLCQPGPPSEKAWQPGWTVNVEGSG
SEQ ID NO. 7
MEFGLSWVFLVALFRGVQCQVQLVQSGAEVKKPGASVKVSCKASGYTFTDYYMHWVRQAPGQGLEWMGRVNPNRRGTTYNQKFEG
RVTMTTDTSTSTAYMELRSLRSDDTAVYYCARANWLDYWGQGTTVTVSSASTKGPSVFPLAPCSRSTSESTAALGCLVKDYFPEP
VTVSWNSGALTSGVHTFPAVLQSSGLYSLSSVVTVPSSSLGTKTYTCNVDHKPSNTKVDKRVESKYGPPCPPCPAPEAAGGPSVF
LFPPKPKDTLMISRTPEVTCVVVDVSQEDPEVQFNWYVDGVEVHNAKTKPREEQFNSTYRVVSVLTVLHQDWLNGKEYKCKVSNK
GLPSSIEKTISKAKGQPREPQVYTLPPSQEEMTKNQVSLTCLVKGFYPSDIAVEWESNGQPENNYKTTPPVLDSDGSFFLYSRLT
VDKSRWQEGNVFSCSVMHEALHNHYTQKSLSLSLG
SEQ ID NO. 8
MPPPRLLFFLLFLTPMEVRPEEPLVVKVEEGDNAVLQCLKGTSDGPTQQLTWSRESPLKPFLKLSLGLPGLGIHMRPLAIWLFIF
NVSQQMGGFYLCQPGPPSEKAWQPGWTVNVEGSGGGGSGGGGSGGGGSDIQMTQSPSSLSASVGDRVTITCSVSSSVSSIYLHWY
QQKPGKAPKLLIYSTSNLASGVPSRFSGSGSGTDFTLTISSLQPEDFATYYCQVYSGYPLTFGGGTKVEIKRTVAAPSVFIFPPS
DEQLKSGTASVVCLLNNFYPREAKVQWKVDNALQSGNSQESVTEQDSKDSTYSLSSTLTLSKADYEKHKVYACEVTHQGLSSPVT
KSFNRGEC
SEQ ID NO. 9
MPPPRLLFFLLFLTPMEVRPEEPLVVKVEEGDNAVLQCLKGTSDGPTQQLTWSRESPLKPFLKLSLGLPGLGIHMRPLAIWLFIF
NVSQQMGGFYLCQPGPPSEKAWQPGWTVNVEGSGGGGSGGGGSGGGGSQVQLVQSGAEVKKPGASVKVSCKASGYTFTDYYMHWV
RQAPGQGLEWMGRVNPNRRGTTYNQKFEGRVTMTTDTSTSTAYMELRSLRSDDTAVYYCARANWLDYWGQGTTVTVSSASTKGPS
VFPLAPCSRSTSESTAALGCLVKDYFPEPVTVSWNSGALTSGVHTFPAVLQSSGLYSLSSVVTVPSSSLGTKTYTCNVDHKPSNT
KVDKRVESKYGPPCPPCPAPEAAGGPSVFLFPPKPKDTLMISRTPEVTCVVVDVSQEDPEVQFNWYVDGVEVHNAKTKPREEQFN
STYRVVSVLTVLHQDWLNGKEYKCKVSNKGLPSSIEKTISKAKGQPREPQVYTLPPSQEEMTKNQVSLTCLVKGFYPSDIAVEWE
SNGQPENNYKTTPPVLDSDGSFFLYSRLTVDKSRWQEGNVFSCSVMHEALHNHYTQKSLSLSL
SEQ ID NO. 10
METDTLLLWVLLLWVPGSTGDIQMTQSPSSLSASVGDRVTITCSVSSSVSSIYLHWYQQKPGKAPKLLIYSTSNLASGVPSRFSG
SGSGTDFTLTISSLQPEDFATYYCQVYSGYPLTFGGGTKVEIKRTVAAPSVFIFPPSDEQLKSGTASVVCLLNNFYPREAKVQWK
VDNALQSGNSQESVTEQDSKDSTYSLSSTLTLSKADYEKHKVYACEVTHQGLSSPVTKSFNRGEC
SEQ ID NO. 11
METDTLLLWVLLLWVPGSTGDIQMTQSPSSLSASVGDRVTITCSVSSSVSSIYLHWYQQKPGKAPKLLIYSTSNLASGVPSRFSG
SGSGTDFTLTISSLQPEDFATYYCQVYSGYPLTFGGGTKVEIKRTVAAPSVFIFPPSDEQLKSGTASVVCLLNNFYPREAKVQWK
VDNALQSGNSQESVTEQDSKDSTYSLSSTLTLSKADYEKHKVYACEVTHQGLSSPVTKSFNRGECDKTHTSPPSPAPEAAGGPSE
VRPEEPLVVKVEEGDNAVLQCLKGTSDGPTQQLTWSRESPLKPFLKLSLGLPGLGIHMRPLAIWLFIFNVSQQMGGFYLCQPGPP
SEKAWQPGWTVNVEGSG
SEQ ID NO. 12
MEFGLSWVFLVALFRGVQCQVQLVQSGAEVKKPGASVKVSCKASGYTFTDYYMHWVRQAPGQGLEWMGRVNPNRRGTTYNQKFEG
RVTMTTDTSTSTAYMELRSLRSDDTAVYYCARANWLDYWGQGTTVTVSSASTKGPSVFPLAPCSRSTSESTAALGCLVKDYFPEP
VTVSWNSGALTSGVHTFPAVLQSSGLYSLSSVVTVPSSSLGTKTYTCNVDHKPSNTKVDKRVESKYGPPCPPCPAPEAAGGPSVF
LFPPKPKDTLMISRTPEVTCVVVDVSQEDPEVQFNWYVDGVEVHNAKTKPREEQFNSTYRVVSVLTVLHQDWLNGKEYKCKVSNK
GLPSSIEKTISKAKGQPREPQVYTLPPSQEEMTKNQVSLTCLVKGFYPSDIAVEWESNGQPENNYKTTPPVLDSDGSFFLYSRLT
VDKSRWQEGNVFSCSVMHEALHNHYTQKSLSLSLGGGGGSGGGGSGGGGSEVRPEEPLVVKVEEGDNAVLQCLKGTSDGPTQQLT
WSRESPLKPFLKLSLGLPGLGIHMRPLAIWLFIFNVSQQMGGFYLCQPGPPSEKAWQPGWTVNVEGSG
SEQ ID NO. 13
METDTLLLWVLLLWVPGSTGDIQMTQTTSSLSASLGDRVTISCRASQDISKYLNWYQQKPDGTVKLLIYHTSRLHSGVPSRFSGS
GSGTDYSLTISNLEQEDIATYFCQQGNTLPYTFGGGTKLEITGGGGSGGGGSGGGGSGGGGSEVKLQESGPGLVAPSQSLSVTCT
VSGVSLPDYGVSWIRQPPRKGLEWLGVIWGSETTYYNSALKSRLTIIKDNSKSQVFLKMNSLQTDDTAIYYCAKHYYYGGSYAMD
YWGQGTSVTVSSPSQFRVSPLDRTWNLGETVELKCQVLLSNPTSGCSWLFQPRGAAASPTFLLYLSQNKPKAAEGLDTQRFSGKR
LGDTFVLTLSDFRRENEGYYFCSALSNSIMYFSHFVPVFLPAKPTTTPAPRPPTPAPTIASQPLSLRPEACRPAAGGAVHTRGLD
FACDIYIWAPLAGTCGVLLLSLVITRSKRSRLLHSDYMNMTPRRPGPTRKHYQPYAPPRDFAAYRSKRGRKKLLYIFKQPFMRPV
QTTQEEDGCSCRFPEEEEGGCELRVKFSRSADAPAYQQGQNQLYNELNLGRREEYDVLDKRRGRDPEMGGKPQRRKNPQEGLYNE
LQKDKMAEAYSEIGMKGERRRGKGHDGLYQGLSTATKDTYDALHMQALPPR
SEQ ID NO. 14
MPPPRLLFFLLFLTPMEVRPEEPLVVKVEEGDNAVLQCLKGTSDGPTQQLTWSRESPLKPFLKLSLGLPGLGIHMRPLAIWLFIF
NVSQQMGGFYLCQPGPPSEKAWQPGWTVNVEGSGHHHHHH
SEQ ID NO. 15
MPPPRLLFFLLFLTPMEVRPEEPLVVKVEEGDNAVLQCLKGTSDGPTQQLTWSRESPLKPFLKLSLGLPGLGIHMRPLAIWLFIF
NVSQQMGGFYLCQPGPPSEKAWQPGWTVNVEGSGDKTHTCPPCPAPELLGGPSVFLFPPKPKDTLMISRTPEVTCVVVDVSHEDP
EVKFNWYVDGVEVHNAKTKPREEQYNSTYRVVSVLTVLHQDWLNGKEYKCKVSNKALPAPIEKTISKAKGQPREPQVYTLPPSRE
EMTKNQVSLTCLVKGFYPSDIAVEWESNGQPENNYKTTPPVLDSDGSFFLYSKLTVDKSRWQQGNVFSCSVMHEALHNHYTQKSL
SLSPG
SEQ ID NO. 16
MEFGLSWVFLVALFRGVQCEVQLVESGGGLVQPGGSLRLSCAASGFNIKDTYIHWVRQAPGKGLEWVARIYPTNGYTRYADSVKG
RFTISADTSKNTAYLQMNSLRAEDTAVYYCSRWGGDGFYAMDYWGQGTLVTVSSASTGGGGSGGGGSGGGGSDIQMTQSPSSLSA
SVGDRVTITCRASQDVNTAVAWYQQKPGKAPKLLIYSASFLYSGVPSRFSGSGSGTDFTLTISSLQPEDFATYYCQQHYTTPPTF
GQGTKVEIKRTGPHHHHHH
SEQ ID NO. 17
MEFGLSWVFLVALFRGVQCQVQLVQSGAEDKKPGESVKISCKASGYTFTNYGMNWVRQAPGQGLKWMGWINTYTGESTYADDFKG
RFAFSLDTSASTAYLQLSSLRGEDTAVYFCARFAIKGDYWGQGTTVTVSSASTGGGGSGGGGSGGGGSGGGGSDIVMTQSPLSLE
VSPGEPASISCRSTKSLLHSDGITYLYWYLQKPGQSPQLLIYQLSNLASGVPDRFSSSGSGTDFTLKISRVEAEDEGTYYCAQNL
EIPRTFGQGTKLEIKRTGPHHHHHH
SEQ ID NO. 18
METDTLLLWVLLLWVPGSTGDIVMTQSPLSLPVTPGEPASISCRSTKSLLHSDGITYLYWYLQKPGQSPQLLIYQLSNLASGVPD
RFSSSGSGTDFTLKISRVEAEDEGVYYCAQNLEIPRTFGCGTKLEIKRTGGGGSGGGGSGGGGSGGGGSQVQLVQSGAEVKKPGE
SVKISCKASGYTFTNYGMNWVRQAPGQCLKWMGWINTYTGESTYADDFKGRFAFSLDTSASTAYLQLSSLRSEDTAVYFCARFAI
KGDYWGQGTLVTVSSGPHHHHHH
SEQ ID NO. 19
MEFGLSWVFLVALFRGVQCQVQLVQSGAEDVKPDASVKLSCKASGYTFTDYYMHWVRQAPGQGLEWMGRVNPNRRGTTYNQKFEG
RVTMTTDTSTSTAYMQLSSLRGEDTAVYYCARANWLDYWGQGTTVTVSSASTGGGGSGGGGSGGGGSGGGGSDIQMTQSPSSLEA
SVGDRVTITCSVSSSVSSIYLHWYQQKPGKSPKLLIYSTSNLASGVPDRFSGSGSGTDFTLTISSLQAEDEGTYYCQVYSGYPLT
FGGGTKLEIKRTGPHHHHHH
SEQ ID NO. 20
METDTLLLWVLLLWVPGSTGDIQMTQSPSSLSASVGDRVTITCSVSSSVSSIYLHWYQQKPGKAPKLLIYSTSNLASGVPSRFSG
SGSGTDFTLTISSLQPEDEATYYCQVYSGYPLTFGCGTKVEIKRTGGGGSGGGGSGGGGSGGGGSQVQLVQSGAEDKKPGASVKV
SCKASGYTFTDYYMHWVRQAPGQCLEWMGRVNPNRRGTTYNQKFEGRVTMTTDTSTSTAYMELRSLRSDDTAVYYCARANWLDYW
GQGTTVTVSSGPHHHHHH
SEQ ID NO. 21
MEFGLSWVFLVALFRGVQCQVQLQESGPGDVKPSETLSLTCTVSGGSVSSGDYYWTWIRQSPGKGLEWIGHIYYSGNTNYNPSLK
SRLTISIDTSKTTFSLQLSSVTGEDTAIYYCVRDRVTGAFDIWGQGTTVTVSSASTGGGGSGGGGSGGGGSGGGGSDIQMTQSPS
SLEASVGDRVTITCQASQDISNYLNWYQQKPGKSPKLLIYDASNLETGVPDRFSGSGSGTDFTFTISSLQAEDEGTYFCQHFDHL
PLAFGGGTKLEIKRTGPHHHHHH
SEQ ID NO. 22
METDTLLLWVLLLWVPGSTGDIQMTQSPSSLSASVGDRVTITCQASQDISNYLNWYQQKPGKAPKLLIYDASNLETGVPSRFSGS
GSGTDFTFTISSLQPEDEATYFCQHFDHLPLAFGCGTKVEIKRTGGGGSGGGGSGGGGSGGGGSQVQLQESGPGDVKPSETLSLT
CTVSGGSVSSGDYYWTWIRQSPGKCLEWIGHIYYSGNTNYNPSLKSRLTISIDTSKTQFSLKLSSVTAADTAIYYCVRDRVTGAF
DIWGQGTTVTVSSGPHHHHHH
SEQ ID NO. 23
MPPPRLLFFLLFLTPMEVRHHHHHHPEEPLVVKVEEGDNAVLQCLKGTSDGPTQQLTWSRESPLKPFLKLSLGLPGLGIHMRPLA
IWLFIFNVSQQMGGFYLCQPGPPSEKAWQPGWTVNVEGSGELFRWNVSDLGGLGCGLKNRSSEGPSSPSGKLMSPKLYVWAKDRP
EIWEGEPPCLPPRDSLNQSLSQDLTMAPGSTLWLSCGVPPDSVSRGPLSWTHVHPKGPKSLLSLELKDDRPARDMWVMETGLLLP
RATAQDAGKYYCHRGNLTMSFHLEITARPGGGGSGGGGSGGGGSVRSSSRTPSDKPVAHVVANPQAEGQLQWLNRRANALLANGV
ELRDNQLVVPSEGLYLIYSQVLFKGQGCPSTHVLLTHTISRIAVSYQTKVNLLSAIKSPCQRETPEGAEAKPWYEPIYLGGVFQL
EKGDRLSAEINRPDYLDFAESGQVYFGIIAL
SEQ ID NO. 24
MEFGLSWVFLVALFRGVQCEVQLVESGGGLVQPGGSLRLSCAASGFNIKDTYIHWVRQAPGKGLEWVARIYPTNGYTRYADSVKG
RFTISADTSKNTAYLQMNSLRAEDTAVYYCSRWGGDGFYAMDYWGQGTLVTVSSASTGGGGSGGGGSGGGGSDIQMTQSPSSLSA
SVGDRVTITCRASQDVNTAVAWYQQKPGKAPKLLIYSASFLYSGVPSRFSGSRSGTDFTLTISSLQPEDFATYYCQQHYTTPPTF
GQGTKVEIKRTDKTHTSPPSPAPEAAGGPSEVRPEEPLVVKVEEGDNAVLQCLKGTSDGPTQQLTWSRESPLKPFLKLSLGLPGL
GIHMRPLAIWLFIFNVSQQMGGFYLCQPGPPSEKAWQPGWTVNVEGSGSRGPHHHHHH
SEQ ID NO. 25
MEFGLSWVFLVALFRGVQCEVQLVESGGGLVQPGGSLRLSCAASGFNIKDTYIHWVRQAPGKGLEWVARIYPTNGYTRYADSVKG
RFTISADTSKNTAYLQMNSLRAEDTAVYYCSRWGGDGFYAMDYWGQGTLVTVSSASTGGGGSGGGGSGGGGSDIQMTQSPSSLSA
SVGDRVTITCRASQDVNTAVAWYQQKPGKAPKLLIYSASFLYSGVPSRFSGSRSGTDFTLTISSLQPEDFATYYCQQHYTTPPTF
GQGTKVEIKRTDKTHTSPPSPAPEAAGGPSEVRPEEPLVVKVEEGDNAVLQCLKGTSDGPTQQLTWSRESPLKPFLKLSLGLPGL
GIHMRPLAIWLFIFNVSQQMGGFYLCQPGPPSEKAWQPGWTVNVEGSGDKTHTCPPCPAPELLGGPSVFLFPPKPKDTLMISRTP
EVTCVVVDVSHEDPEVKFNWYVDGVEVHNAKTKPREEQYNSTYRVVSVLTVLHQDWLNGKEYKCKVSNKALPAPIEKTISKAKGQ
PREPQVYTLPPSREEMTKNQVSLTCLVKGFYPSDIAVEWESNGQPENNYKTTPPVLDSDGSFFLYSKLTVDKSRWQQGNVFSCSV
MHEALHNHYTQKSLSLSPG
SEQ ID NO. 26
MPPPRLLFFLLFLTPMEVRPEEPLVVKVEEGDNAVLQCLKGTSDGPTQQLTWSRESPLKPFLKLSLGLPGLGIHMRPLAIWLFIF
NVSQQMGGFYLCQPGPPSEKAWQPGWTVNVEGSGGGGGSGGGGSGGGGSGGGGSEVQLVESGGGLVQPGGSLRLSCAASGFNIKD
TYIHWVRQAPGKGLEWVARIYPTNGYTRYADSVKGRFTISADTSKNTAYLQMNSLRAEDTAVYYCSRWGGDGFYAMDYWGQGTLV
TVSSASTGGGGSGGGGSGGGGSDIQMTQSPSSLSASVGDRVTITCRASQDVNTAVAWYQQKPGKAPKLLIYSASFLYSGVPSRFS
GSRSGTDFTLTISSLQPEDFATYYCQQHYTTPPTFGQGTKVEIKRTSRGPHHHHHH
SEQ ID NO. 27
MPPPRLLFFLLFLTPMEVRPEEPLVVKVEEGDNAVLQCLKGTSDGPTQQLTWSRESPLKPFLKLSLGLPGLGIHMRPLAIWLFIF
NVSQQMGGFYLCQPGPPSEKAWQPGWTVNVEGSGGGGGSGGGGSGGGGSGGGGSEVQLVESGGGLVQPGGSLRLSCAASGFNIKD
TYIHWVRQAPGKGLEWVARIYPTNGYTRYADSVKGRFTISADTSKNTAYLQMNSLRAEDTAVYYCSRWGGDGFYAMDYWGQGTLV
TVSSASTGGGGSGGGGSGGGGSDIQMTQSPSSLSASVGDRVTITCRASQDVNTAVAWYQQKPGKAPKLLIYSASFLYSGVPSRFS
GSRSGTDFTLTISSLQPEDFATYYCQQHYTTPPTFGQGTKVEIKRTDKTHTCPPCPAPELLGGPSVFLFPPKPKDTLMISRTPEV
TCVVVDVSHEDPEVKFNWYVDGVEVHNAKTKPREEQYNSTYRVVSVLTVLHQDWLNGKEYKCKVSNKALPAPIEKTISKAKGQPR
EPQVYTLPPSREEMTKNQVSLTCLVKGFYPSDIAVEWESNGQPENNYKTTPPVLDSDGSFFLYSKLTVDKSRWQQGNVFSCSVMH
EALHNHYTQKSLSLSPG
SEQ ID NO. 28
MPPPRLLFFLLFLTPMVERPEEPLVVKVEEGDNAVLQCLKGTSDGPTQQLTWSRESPLKPFLKLSLGLPGLGIHMRPLAIWLFIF
NVSQQMGGFYLCQPGPPSEKAWQPGWTVNVEGSGELFRWNVSDLGGLGCGLKNRSSEGPSSPSGKLMSPKLYVWAKDRPEIWEGE
PPCLPPRDSLNQSLSQDDLTMAPGSTLWLSCGVPPDSVSRGPLSWTHVHPKGPKSLLSLELKDDRPARDMWVMETGLLLPRATAQ
DAGKYYCHRGNLTMSFHLEITARPHHHHHH
SEQ ID NO. 29
MPPPRLLFFLLFLTPMEVRPEEPLVVKVEEGDNAVLQCLKGTSDGPTQQLTWSRESPLKPFLKLSLGLPGLGIHMRPLAIWLFIF
NVSQQMGGFYLCQPGPPSEKAWQPGWTVNVEGSGELFRWNVSDLGGLGCGLKNRSSEGPSSPSGKLMSPKLYVWAKDRPEIWEGE
PPCLPPRDSLNQSLSQDLTMAPGSTLWLSCGVPPDSVSRGPLSWTHVHPKGPKSLLSLELKDDRPARDMWVMETGLLLPRATAQD
AGKYYCHRGNLTMSFHLEITARPDKTHTCPPCPAPELLGGPSVFLFPPKPKDTLMISRTPEVTCVVVDVSHEDPEVKFNWYVDGV
EVHNAKTKPREEQYNSTYRVVSVLTVLHQDWLNGKEYKCKVSNKALPAPIEKTISKAKGQPREPQVYTLPPSREEMTKNQVSLTC
LVKGFYPSDIAVEWESNGQPENNYKTTPPVLDSDGSFFLYSKLTVDKSRWQQGNVFSCSVMHEALHNHYTQKSLSLSPG
SEQ ID NO. 30
MPPPRLLFFLFLTPMEVRPRDSLNQSLSQDLTMAPGSTLWLSCGVPPDSVSRGPLSWTHVHPKGPKSLLSLELKDDRPARDMWVM
ETGLLLPRATAQDAGKYYCHRGNLTMSFHLEITARPHHHHHH
SEQ ID NO. 31
MPPPRLLFFLLFLTPMEVRPRDSLNQSLSQDLTMAPGSTLWLSCGVPPDSVSRGPLSWTHVHPKGPKSLLSLELKDDRPARDMWV
METGLLPRATAQDAGKYYCHRGNLTMSFHLEITARPDKTHTCPPCPAPELLGGSPVFLFPPKPKDTLMISRTPEVTCVVVDVSHE
DPEVKFNWYVDGHEVHNAKTKPREEQYNSTYRVVSVLTVLHQDWLNGKEYKCKVSNKALPAPIEKTISKAKGQPREPQVYTLPPS
REEMTKNQVSLTCLVKGFYPSDIAVEWESNGQEPNNYKTTPPVLDSDGSFFLYSKLTVDKSRWQQGNVFSCSVMHEALHNHYTQK
SLSLSPG
SEQ ID NO. 32
MPPPRLLFFLLFLTPMEVRPEEPLVVKVEEGDVANLQCLKGTSDGPTQQLTWSRESPLKPFLKLSLGLPGLGIHMRPLAIWLFIF
NVSQQMGGFYLCQPGPPSEKAWQPGWTVNVEGSGELFRWNVSDLGGLGCGLKNRSSEGPSSPSGKLMSPKLYVWADKRPEIWEGE
PPCLPPRDSLNQSLSQDLTMAPGSTLWLSCGVPPDSVSRGPLSWTHVHPKGPKSLLSLELKDDRPARDMWVMETGLLLPRATAQD
AGKYYCHRGNLTMSFHLEITARPGGGGSGGGGSGGGGSDIQMTQSPSSLSASVGDRVTITCQASQDISNYLNWYQQKPGKAPKLL
IYDASNLETGVPSRFSGSGSGTDFTFTISSLQPEDIATYFCQHFDHLPLAFGGGTKVEIKRTVAAPSVFIFPPSDEQLKSGTASV
VCLLNNFYPREAKVQWKVDNALQSGNSQESVTEQDSKDSTYSLSSTLTLSKADYEKHKVYACEVTHQGLSSPVTKSFNRGEC
SEQ ID NO. 33
MPPPRLLFFLLFLTPMEVRPEEPLVVKVEEGDVANLQCLKGTSDGPTQQLTWSRESPLKPFLKLSLGLPGLGIHMRPLAIWLFIF
NVSQQMGGFYLCQPGPPSEKAWQPGWTVNVEGSGELFRWNVSDLGGLGCGLKNRSSEGPSSPSGKLMSPKLYVWAKDRPEIWEGE
PPCLPPRDSLNQSLSQDLTMAPGSTLWLSCGVPPDSVSRGPLSWTHVHPKGPKSLLSLELKDDRPARDMWVMETGLLLPRATAQD
AGKYYCHRGNLTMSFHLEITARPGGGGSGGGGSGGGGSQVQLQESGPGLVKPSETLSLTCTVSGGSVSSGDYYWTWIRQSPGKGL
EWIGHIYYSGNTNYNPSLKSRLTISIDTSKTQFSLKLSSVTAADTAIYYCVRDRVTGAFDIWGQGTMVTVSSASTKGPSVFPLAP
CSRSTSESTAALGCLVKDYFPEPVTVSWNSGALTSGVHTFPAVLQSSLGYSLSSVVTVPSSNFGTQTYTCNVDHKPSNTKVDKTV
ERKCCVECPPCPAPPVAGPSVFLFPPKPKDTLMISRPTEVTCVVVDVSHEDPEVQFNWYVDGVEVHNAKTKPREEQFQSTFRVVS
VLTVVHQDWLNGKEYKCKVSNKGLPAPIEKTISKTKGQPREPQVYTLPPSREEMTKNQVSLTCLVKGFYPSDIAVEWESNGQPEN
NYKTTPPMLDSDGSFFLYSKLTVDKSRWQQGNVFSCSVMHEALHNHYTQKSLSLSPG
SEQ ID NO. 34
METDTLLLWVLLLWVPGSTGDIQMTQSPSSLSASVGDRVTITCQASQDISNYLNWYQQKPGKAPKLLIYDASNLETGVPSRFSGS
GSGTDFTFTISSLQPEDIATYFCQHFDHLPLAFGGGTKVEIKRTVAAPSVFIFPPSDEQLKSGTASVVCLLNNFYPREAKVQWKV
DNALQSGNSQESVTEQDSKDSTYSLSSTLTLSKADYEKHKVYACEVTHQGLSSPVTKSFNRGECDKTHTSPPSPAPEAAGGPSPE
EPLVVKVEEGDNAVLQCLKGTSDGPTQQLTWSRESPLKPFLKLSLGLPGLGIHMRPLAIWLFIFNVSQQMGGFYLCQPGPPSEKA
WQPGWTVNVEGSGELFRWNVSDLGGLGCGLKNRSSEGPSSPSGKLMSPKLYVWAKDRPEIWEGEPPCLPPRDSLNQSLSQDLTMA
PGSTLWLSCGVPPDSVSRGPLSWTHVHPKGPKSLLSLELKDDRPARDMWVMETGLLLPRATAQDAGKYYCHRGNLTMSFHLEITA
RP
SEQ ID NO. 35
MEFGLSWVFLVALFRGVQCQVQLQESGPGLVKPSETLSLTCTVSGGSVSSGDYYWTWIRQSPGKGLEWIGHIYYSGNTNYNPSLK
SRLTISIDTSKTQFSLKLSSVTAADTAIYYCVRDRVTGAFDIWGQGTMVTVSSASTKGPSVFPLAPCSRSTSESTAALGCLVKDY
FPEPVTVSWNSGALTSGVHTFPAVLQSSGLYSLSSVVTVPSSNFGTQTYTCNVDHKPSNTKVDKTVERKCCVECPPCPAPPVAGP
SVFLFPPKPKDTLMISRTPEVTCVVVDVSHEDPEVQFNWYVDGVEVHNAKTKPREEQFQSTFRVVSVLTVVHQDWLNGKEYKCKV
SNKGLPAPIEKTISKTKGQPREPQVYTLPPSREEMTKNQVSLTCLVKGFYPSDIAVEWESNGQEPNNYKTTPPMLDSDGSFFLYS
KLTVDKSRWQQGNVFSCSVMHEALHNHYTQKSLSLSPGGGGSGGGGSGGGGSPEEPLVVKVEEGDNAVLQCLKGTSDGPTQQLTW
SRESPLKPFLKLSLGLPGLGIHMRPLAIWLFIFNVSQQMGGFLYCQPGPPSEKAWQPGWTVNVEGSGELFRWNVSDLGGLGCGLK
NRSSEGPSSPSGKLMSPKLYVWAKDRPEIWEGEPPCLPPRDSLNQSLSQDLTMAPGSTLWLSCGVPPDSVSRGPLSWTHVHPKGP
KSLLSLELKDDRPARDMWVMETGLLLPRATAQDAGKYYCHRGNLTMSFHLEITARP
SEQ ID NO. 36
MPPPRLLFFLLFTLPVEVRPEEPLVVKVEEGDNAVLQCLKGTSDGPTQQLTWSRESPLKPFLKLSLGLPGLGIHMRPLAIWLFIF
NVSQQMGGFYLCQPGPPSEKAWQPGWTVNVEGSGELFRWNVSDLGGLGCGLKNRSSEGPSSPSGKLMSPKLYVWAKDRPEIWEGE
PPCLPPRDSLNQSLSQDLTMAPGSTLWLSCGVPPDSVSRGPLSWTHVHPKGPKSLLSLELKDDRPARDMWVMETGLLLPRATAQD
AGKYYCHRGNLTMSFHLEITARPGGGGSGGGGSGGGGSDIQMTQSPSSLSASVGDRVTITCSVSSSVSSIYLHWYQQKPGKAPKL
LIYSTSNLASGVPSRFSGSGSGTDFTLTISSLQPEDFATYYCQVYSGYPLTFGGGTKVEIKRTVAAPSVFIFPPSDEQLKSGTAS
VVCLLNNFYPREAKVQWKVDNALQSGNSQESVTEQDSKDSTYSLSSTLTLSKADYEKHKVYACEVTHQGLSSPVTKSFNRGEC
SEQ ID NO. 37
MPPPRLLFFLLFLTPMEVRPEEPLVVKVEEGDNAVLQCLKGTSDGPTQQLTWSRESPLKPFLKLSLGLPGLGIHMRPLAIWLFIF
NVSQQMGGFYLCQPGPPSEKAWQPGWTVNVEGSGELFRWNVSDLGGLGCGLKNRSSEGPSSPSGKLMSPKLYVWAKDRPEIWEGE
PPCLPPRDSLNQSLSQDLTMAPGSTLWLSCGVPPDSVSRGPLSWTHVHPKGPKSLLSLELKDDRPARDMWVMETGLLLPRATAQD
AGKYYCHRGNLTMSFHLEITARPGGGGSGGGGSGGGGSQVQLVQSGAEVKKPGASVKVSCKASGYTFTDYYMHWVRQAPGKGLEW
MGRVNPNRRGTTYNQKFEGRVTMTTDTSTSTAYMELRSLRSDDTAVYYCARANWLDYWGQGTTVTVSSASTKGPSVFPLAPCSRS
TSESTAALGCLVKDYFPEPVTVSWNSGALTSGVHTFPAVLQSSGLYSLSSVVTVPSSSLGTKTYTCNVDHKPSNTKVDKRVESKY
GPPCPPCPAPEAAGGPSVFLFPPKPKDTLMISRTPEVTCVVVDVSQEDPEVQFNWYVDGVEVHNAKTKPREEQFNSTYRVVSVLT
VLHQDWLNGKEYKCKVSNKGLPSSIEKTISKAKGQPREPQVYTLPPSQEEMTKNQVSLTCLVKGFYPSDIAVEWESNGQPENNYK
TTPPVLDSDGSFFLYSRLTVDKSRWQEGNVFSCSVMHEALHNHYTQKSLSLSL
SEQ ID NO. 39
METDTLLLWVLLLWVPGSTGDIQMTQSPSSLSASVGDRVTITCSVSSSVSSIYLHWYQQKPGKAPKLLIYSTSNLASGVPSRFSG
SGSGTDFTLTISSLQPEDFATYYCQVYSGYPLTFGGGTKVEIKRTVAAPSVFIFPPSDEQLKSGTASVVCLLNNFYPREAKVQWK
VDNALQSGNSQESVTEQDSKDSTYSLSSTLTLSKADYEKHKVYACEVTHQGLSSPVTKSFNRGECDKTHTSPPSPAPEAAGGPSP
EEPLVVKVEEGDNALQCLKGTSDGPTQQLTWSRESPLKPFLKLSLGLPGLGIHMRPLAIWLFIFNVWQQMGGFYLCQPGPPSEKA
WQPGWTVNVEGSGELFRWNVSDLGGLGCGLKNRSSEGPSSPSGKLMSPKLYVWAKDRPEIWEGEPPCLPPRDSLNQSLSQDLTMA
PGSTLWLSCGVPPDSVSRGPLSWTHVHPKGPKSLLSLELKDDRPARDMWVMETGLLLPRATAQDAGKYYCHRGNLTMSFHLEITA
RP
SEQ ID NO. 39
MEFGLSWVFLVALFRGVQCQVQLVQSGAEVKKPGASVKVSCKASGYTFTDYYMHWVRQAPGQGLEWMGRVNPNRRGTTYNQKFEG
RVTMTTDTSTSTAYMELRSLRSDDTAVYYCARANWLDYWGQGTTVTVSSASTKGPSVFPLAPCSRSTSESTAALGCLVKDYFPEP
VTVSWNSGALTSGVHTFPAVLQSSGLYSLSSVVTVPSSSLGTKTYTCNVDHKPSNTKVDKRVESKYGPPCPPCPAPEAAGGPSVF
LFPPKPKDTLMISRTPEVTCVVVDVSQEDPEVQFNWYVDGVEVHNAKTKPREEQFNSTYRVVSVLTVLHQDWLNGKEYKCKVSNK
GLPSSIEKTISKAKGQPREPQVYTLPPSQEEMTKNQVSLTCLVKGFYPSDIAVEWESNGQPENNYKTTPPVLDSDGSFFLYSRLT
VDKSRWQEGNVFSCSVMHEALHNHYTQKSLSLSLGGGGSGGGGSGGGGSPEEPLVVKVEEGDNAVLQCLKGTSDGPTQQLTWSRE
SPLKPFLKLSLGLPGLGIHMRPLAIWLFIFNVSQQMGGFYLCQPGPPSEKAWQPGWTVNVEGSGELFRWNVSDLGGLGCGLKNRS
SEGPSSPSGKLMSPKLYVWAKDRPEIWEGEPPCLPPRDSLNQSLSQDLTMAPGSTLWLSCGVPPDSVSRGPLSWTHVHPKGPKSL
LSLELKDDRPARDMWVMETGLLLPRATAQQDAGKYYCHRGNLTMSFHLEITARP
SEQ ID NO. 40
MEFGLSWVFLVALFRGVQCEVQLVESGGGLVQPGGSLRLSCAASGFNIKDTYIHWVRQAPGKGLEWVARIYPTNGYTRYADSVKG
RFTISADTSKNTAYLQMNSLRAEDTAVYYCSRWGGDGFYAMDYWGQGTLVTVSSASTGGGGSGGGGSGGGGSDIQMTQSPSSLSA
SVGDRVTITCRASQDVNTAVAWYQQKPGKAPKLLIYSASFLYSGVPSRFSGSRSGTDFTLTISSLQPEDFATYYCQQHYTTPPTF
GQGTKVEIMKRTDKTHTSPPSPAPEAAGGPSPEEPLVVKVEEGDNAVLQCLKGTSDGPTQQLTWSRESPLKPFLKLSLGLPGLGI
HMRPLAIWLFIFNVSQQMGGFYLCQPGPPSEKAWQPGWTVNVEGSGELFRWNVSDLGGLGCGLKNRSSEGPSSPSGKLMSPKLYV
WAKDRPEIWEGEPPCLPPRDSLNQSLSQDLTMAPGSTLWLSCGVPPDSVSRGPLSWTHVHPKGPKSLLSLELKDDRPARDMWVME
TGLLLPRATAQDAGKYYCHRGNLTMSFHLEITARPSRGPHHHHHH
SEQ ID NO. 41
MEFGLSWVFLVALFRGVQVEVQLVESGGGLVQPGGSLRLSCAASGFNIKDTYIHWVRQAPGKGLEWVARIYPTNYGYTRYADSVK
GRFTISADTSKNTAYLQMNSLRAEDTAVYYCSRWGGDGFYAMDYWGQGTLVTVSSASTGGGGSGGGGSGGGGSDIQMTQSPSSLS
ASVGDRVTITCRASQDVNTAVAWYQQKPGKAPKLLIYSASFLYSGVPSRFSGSRSGTDFTLTISSLQPEDFATYYCQQHYTTPPT
FGQGTKVEIKRTDKTHTSPPSPAPEAAGGPSPEEPLVVKVEEGDNAVLQCLKGTSDGPTQQLTWSRESPLKPFLKLSLGLPGLGI
HMRPLAIWLFIFNVSQQMGGFYLCQPGPPSEKAWQPGWTVNVEGSGELFRWNVSDLGGLGCGLKNRSSEGPSSPSGKLMSPKLYV
WAKDRPEIWEGEPPCLPPRDSLNQSLSQDLTMAPGSTLWLSCGVPPDSVSRGPLSWTHVHPKGPKSLLSLELKDDRPARDMWVME
TGLLLPRATAQDAGKYYCHRGNLTMSFHLEITARPDKTHTCPPCPAPELLGGPSVFLFPPKPKDTLMISRTPEVTCVVVDVSHED
PEVKFNWYVDGVEVHNAKTKPREEQYNSTYRVVSVLTVLHQDWLNGKEYKCKVSNKALPAPIEKTISKAKGQPREPQVYTLPPSR
EEMTKNQVSLTCLVKGFYPSDIAVEWESNGQPENNYKTTPPVLDSDGSFFLYSKLTVDKSRWQQGNVFSCSVMHEALHNHYTQKS
LSLSPG
SEQ ID NO. 42
MPPPRLLFFLLFLTPMEVRPEEPLVVKVEEGDNAVLQCLKGTSDGPTQQLTWSRESPLKPFLKLSLGLPGLGIHMRPLAIWLFIF
NVSQQMGGFYLCQPGPPSEKAWQPGWTVNVEGSGELFRWNVSDLGGLGCGLKNRSSEGPSSPSGKLMSPKLYVWAKDRPEIWEGE
PPCLPPRDSLNQSLSQDLTMAPGSTLWLSCGVPPDSVSRGPLSWTHVHPKGPKSLLSLELKDDRPARDMWVMETGLLLPRATAQD
AGKYYCHRGNLTMSFHLEITARPGGGGSGGGGSGGGGSGGGGSEVQLVESGGGLVQPGGSLRLSCAASGFNIKDTYIHWVRQAPG
KGLEWVARIYPTNGYTRYADSVKGRFTISADTSKNTAYLQMNSLRAEDTAVYYCSRWGGDGFYAMDYWGQGTLVTVSSASTGGGG
SGGGGSGGGGSDIQMTQSPSSLSASVGDRVTITCRASQDVNTAVAWYQQKPGKAPKLLIYSASFLYSGVPSRFSGSRSGTDFTLT
ISSLQPEDFATYYCQQHYTTPPTFGQGTKVEIKRTSRGPHHHHHH
SEQ ID NO. 43
MPPPRLLFFLLFLTPMEVRPEEPLVVKVEEDGNAVLQCLKGTSDGPTQQLTWSRESPLKPFLKLSLGLPGLGIHMRPLAIWLFIF
NVSQQMGGFYLCQPGPPSEKAWQPGWTVNVEGSGELFRWNVSDLGGLGCGLKNRSSEGPSSPSGKLMSPKLYVWAKDRPEIWEGE
PPCLPPRDSLNQSLSQDLTMAPGSTLWLSCGVPPDSVSRGPLSWTHVHPKGPKSLLSLELKDDRPARDMWVMETGLLLPRATAQD
AGKYYCHRGNLTMSFHLEITARPGGGGSGGGGSGGGGSGGGGSEVQLVESGGGLVQPGGSLRLSCAASGFNIKDTYIHWVRQAPG
KGLEWVARIYPTNGYTRYADSVKGRFTISADTSKNTAYLQMNSLRAEDTAVYYCSRWGGDGFYAMDYWGQGTLVTVSSASTGGGG
SGGGGSGGGGSDIQMTQSPSSLSASVGDRVTITCRASQDVNTAVAWYQQKPGKAPKLLIYSASFLYSGVPSRFSGSRSGTDFTLT
ISSLQPEDFATYYCQQHYTTPPTFGQGTKVEIKRTDKTHTCPPCPAPELLGGPSVFLFPPKPKDTLMISRTPEVTCVVVDVSHED
PEVKFNWYVDGVEVHNAKTKPREEQYNSTRYVVSVLTVLHQDWLNGKEYKCKVSNKALPAPIEKTISKAKGQPREPQVYTLPPSR
EEMTKNQVSLTCLVKGFYPSDIAVEWESNGQPENNYKTTPPVLDSDGSFFLYSKLTVDKSRWQQGNVFSCSVMHEALHNHYTQKS
LSLSPG
SEQ ID NO. 46
MESDESGLPAMEIECRITGTLNGVEFELVGGGEGTPEQGRMTNKMKSTKGALTFSPYLLSHVMGYGFYHFGTYPSGYENPFLHAI
NNGGYTNTRIEKYEDGGVLHVSFSYRYEAGRVIGDFKVMGTGFPEDSVIFTDKIIRSNATVEHLHPMGDNDLDGSFTRTFSLRDG
GYYSSVVDSHMHFKSAIHPSILQNGGPMFAFRRVEEDHSNTELGIVEYQHAFKTPDADAGEERV
SEQ ID NO. 47
MESDESGLPAMEIECRITGTLNGVEFELVGGGEGTPEQGRMTNKMKSTKGALTFSPYLLSHVMGYGFYHFGTYPSGYENPFLHAI
NNGGYTNTRIEKYEDGGVLHVSFSYRYEAGRVIGDFKVMGTGFPEDSVIFTDKIIRSNATVEHLHPMGDNDLDGSFTRTFSLRDD
GGYYSSVVDSHMHFKSAIHPSILQNGGPMFAFRRVEEDHSNTELGIVEYQHAFKTPDADAGEERV
SEQ ID NO. 48
MESDESGLPAMEIECRITGTLNGVEFELVGGGEGTPEQGRMTNKMKSTKGALTFSPYLLSHVMGYGFYHFGTYPSGYENPFLHAI
NNGGYTNTRIEKEDGGVLHNVSFSYRYEAGRVIGDFNVMGTGFPEDSVIFTDKIIRSNATVEHLHPMGDNDLDGSFTRTFSLRDG
GYYSSVVDSHMHFKSAIHPSILQNGGPMFAFRRVEEDHSNTELGIVEYQHAFKTPDADAGEERV
SEQ ID NO. 49
MESDESGLPAMEIECRITGTLNGVEFELVGGGEGTPEQGRMTNKNKSTKGALTFSPYLLSHVMGYGFYHFGTYPSGYENPFLHAI
NNGGYTNTRIEKYEDGGVLHVSFSYRYEAGRVIGDFKVMGTGFPEDSVIFTDKIIRSNATVEHLHPMGDNDLDGSFTRTFSLRDG
GYYSSVVDSHMHFKSAIHPSILQNGGPMFAFRRVEEDHSNTELGIVEYQHAFKTPDADAGEERV
SEQ ID NO. 50
MPPPRLLFFLLFLTPMEVRPEEPLVVKVEEGDNAVLQCLKGTSDGPTQQLTWSRESPLKPFLKLSLGLPGLGIHMRPLAIWLFIF
NVSQQMGGFLYCQPGPPSEKAWQPGWTVNVEGSGELFRWNVSDLGGLGCGLKNRSSEGPSSPSGKLMSPKLYVWAKDRPEIWEGE
PPCLPPRDSLNQSLSQDLTMAPGSTLWLSCGVPPDSVSRGPLSWTHVHPKGPKSLLSLELKDDRPARDMWVMETGLLLPRATAQD
AGKYYCHRGNLTMSFHLEITARPVLWHWLLRTGGWKGGGGSGGGGSGGGGSGGGGSQVQLQESGPGLVKPSETLSLTCTVSGGSV
SSGDYYWTWIRQSPGKGLEWIGHIYYSGNTNYNPSLKSRLTISIDTSKTQFSLKLSSVTAADTAIYYCVRDRVTGAFDIWGQGTM
VTVSSASTKGPSVFPLAPCSRSTSESTAALGCLVKDYFPEPVTVSWNSGALTSGVHTFPAVLQSSGLYSLSSVVTVPSSNFGTQT
YTCNVDHKPSNTKVDKTVERKCCVECPPCPAPPVAGPSVFLFPPKPKDTLMISRTPEVTCVVVDVSHEDPEVQFNWYVDGVEVHN
AKTKPREEQFQSTFRVVSVLTVVHQDWLNGKEYKCKVSNKGLPAPIEKTISKTKGQPREPQVYTLPPSREEMTKNQVSLTCLVKG
FYPSIDAVEWESNGQPENNYKTTPPMLDSDGSFFLYSKLTVDKSRWQQGNVFSCSVMHEALHNHYTQKSLSLSPG
SEQ ID NO. 51
MPPPRLLFFLLFLTPMEVRPEEPLVVKVEEGDNAVLQCLKGTSDGPTQQLTWSRESPLKPFLKLSLGLPGLGIHMRPLAIWLFIF
NVSQQMGGFYLCQPGPPSEKAWQPGWTVNVEGSGELFRWNVSDLGGLGCGLKNRSSEGPSSPSGKLMSPKLYVWAKDRPEIWEGE
PPCLPPRDSLNQSLSQDLTMAPGSTLWLSCGVPPDSVSRGPLSWTHVHPKGPKSLLSLELKDDRPARDMWVMETGLLLPRATAQD
AGKYYCHRGNLTMSFHLEITARPVLWHWLLRTGGWKGGGGSGGGGSGGGGSGGGGSQVQLVQSGAEVKKPGASVKVSCKASGYTF
TDYYMHWVRQAPGQGLEWMGRVNPNRRGTTYNQKFEGRVTMTTDTSTSTAYMELRSLRSDDTAVYYCARANWLDYWGQGTTVTVS
SASTKGPSVFPLAPCSRSTSESTAALGCKVKDYFPEPVTVSWNSGALTSGVHTFPAVLQSSGLYSLSSVVTVPSSSLGTKTYTCN
CDHKPSNTKVDKRVESKYYGPPCPPCPAPEAAGGPSVFLFPPKPKDTLMISRPTEVTCVVVDVSQEDPEVQFNWYVDGVEVHNAK
TKPREEQFNSTYRVVSVLTVLHQDWLNGKEYKCKVSNKGLPSSIEKTISKAKGQPREPQVYTLPPSQEEMTKNQVSLTCLVKGFY
PSIDAVEWESNGQEPNNYKTTPPVLDSDGSFFLYSRLTVDKSRWQEGNVFSCSVMHEALHNHYTQKSLSLSL
SEQ ID NO. 52
MPPPRLLFFLLFLTPMEVRPEEPLVVKVEEGDNAVLQCLKGTSDGPTQQLTWSRESPLKPFLKLSLGLPGLGIHMRPLAIWLFIF
NVSQQMGGFYLCQPGPPSEKAWQPGWTVNVEGSGELFRWNVSDLGGLGCGLKNRSSEGPSSPSFKLMSPKLYVWAKDRPEIWEGE
PPCLPPRDSLNQSLSQDLTMAPGSTLWLSCGVPPDSVSRGPLSWTHVHPKGPKSLLSLELKDDRPARDMWVMETGLLLPRATAQD
AGKYYCHRGNLTMSFHELITARPVLWHWLLRTGGWKGGGGSGGGGSGGGGSGGGGSQVQLVQSGAEDKKPGESVKISCSASGYTF
TNYGMNWVRQAPGQGLKWMGWINTYTGESTYADDFKGRFAFSLDTSASTAYLQLSSLRGEDTAVYFARFAIKGDYWGQGTTVTVS
SASTGGGGSGGGGSGGGGSGGGGSDIVMTQSPLSLEVSPGEPASISVRSTKSLLHSDGITYLYWYLQKPGQSPQLLIYQLSNLAS
GVPDRFSSSGSGTDFTLKISRVEAEDEGTYYCAQNLEIPRTFGQGTKLEIKRTHHHHHH
SEQ ID NO. 53
MPPPRLLFFLLFLTPMVERPEEPLVVKVEEGDNAVLQCLKGTSDGPTQQLTWSRESPLKPFLKLSLGLPGLGIHMRPLAIWLFIF
NVSQQMGGFYLCQPGPPSEKAWQPGWTVNVEGSGELFRWNVSDLGGLGCGLKNRSSEGPSSPSGKLMSPKLYVWAKDRPEIWEGE
PPCLPPRDSLNQSLSQDLTMAPGSTLWLSCGVPPDSVSRGPLSWTHVHPKGPKSLLSLELKDDRPARDMWVMETGLLLPRATAQD
AGKYYCHRGNLTMSFHLEITARPVLWHWLLRTGGWKGGGGSGGGGSGGGGSGGGGSQVQLVQSGAEDVKPDASVKLSCKASGYTF
TDYYMHWVRQAPGQGLEWMGRVNPNRRGTTYNQKFEGRVTMTTDTSTSTAYMQLSSLRGEDTAVYYCARANWLDYWGQGTTVTVS
SASTGGGGSGGGGSGGGGSGGGGSDIQMTQSPSSLEASVGDRVTITCSVSSSVSSIYLHJWYQQKPGKSPKLLIYSTSNLASGVP
DRFSGSGSGTDFTLTISSLQAEDEGTYYCQVYSGYPLTFGGGTKLEIKRTHHHHHH
SEQ ID NO. 54
MPPPRLLFFLLFLTPMEVRPEEPLVVKVEEDGNAVLQCLKGTSDGPTQQLTWSRESPLKPFLKLSLGLPGLGIHMRPLAIWLFIF
NVSQQMGGFYLCQPGPPSEKAWQPGWTVNVEGSGELFRWNVSDLGGLGCGLKNRSSEGPSSPSGKLMSPKLYVWAKDRPEIWEGE
PPCLPPRDSLNQSLSQDLTMAPGSTLWLSCGVPPDSVSRGPLSWTHVHPKGPKSLLSLELKDDRPARDMWVMETGLLLPRATAQD
AGKYYCHRGNLTMSFHLEITARPVLWHWLLRTGGWKGGGGSGGGGSGGGGSGGGGSQVQLQESGPGDVKPSETLSLTCTVSGGSV
SSGDYYWTWIRQSPGKGLEWIGHIYYSGNTNYNPSLKSRLTISIDTSKTTFSLQLSSVTGEDTAIYYCVRDRVTGAFDIWGQGTT
VTVSSASTGGGGSGGGGSGGGGSGGGGSDIQMTQSPSSLEASVGDRVTITCQASQDISNYLNWYQQKPGKSPKLLIYDASNLETG
VPDRFSGSGSGTDFTFTISSLQAEDEGTYFCQHFDHLPLAFGGGTKLEIKRTHHHHHH
SEQ ID NO. 55
MPPPRLLFFLLFLTPMEVRPEEPLVVKVEEGDNAVLQCLKGTSDGPTQQLTWSRESPLKPFLKLSLGLPGLGIHMRPLAIWLFIF
NVSQQMGGFYLCQPGPPSEKAWQPGWTVNVEGSGELFRWNVSDLGGLGCGLKNRSSEGPSSPSGKLMSPKLYVWAKDRPEIWEGE
PPCLPPRDSLNQSLSQDLTMAPGSTLWLSCGVPPDSVSRGPLSWTHVHPKGPKSLLSLELKDDRPARDMWVMETGLLLPRATAQD
AGKYYCHRGNLTMSFHLEITARPVLWHWLLRTGGWKGGGGSGGGGSGGGGSGGGGSEVQLVESGGGLVQPGGSLRLSCAASGFNI
KDTYIHWVRQAPGKGLEWVARIYPTNGYTRYADSVKGRFTISADTSKNTAYLQMNSLRAEDTAVYYCSRWGGDGFYAMDYWGQGT
LVTVSSASTGGGGSGGGGSGGGGSDIQMTQSPSSLSASVGDRVTITCRASQDVNTAVAWYQQKPGKAPKLLIYSASFLYSGVPSR
FSGSRSGTDFTLTISSLQPEDFATYYCQQHYTTPPTFGQGTKVEIKRTHHHHHH
SEQ ID NO. 56
MPPPRLLFFLLFLTPMEVRPEEPLVVKVEEGDNAVLQCLKGTSDGPTQQLTWSRESPLKPFLKLSLGLPGLGIHMRPLAIWLFIF
NVSQQMGGFYLCQPGPPSEKAWQPGWTVNVEGSGELFRWNVSDLGGLGCGLKNRSSEGPSSPSGKLMSPKLYVWAKDRPEIWEGE
PPCLPPRDSLNQSLSQDLTMAPGSTLWLSCGVPPDSVSRGPLSWTHVHPKGPKSLLSLELKDDRPARDMWVMETGLLLPRATAQD
AGKYYCHRGNLTMSFHLEITARPVLWHWLLRTGGWKDKTHTCPPCPAPELLGGPSVFLFPPKPKDTLMISRTPEVTCVVVDVSHE
PEVKFNWYVDGVEVHNAKTKPREEQYNSTYRVVSVLTVLHQDWLNGKEYKCKVSNKALPAPIEKTISKAKGQPREPQVYTLPPSR
EEMTKNQVSLTCLVKGFYPSDAIVEWESNGQPENNYKTTPPVLDSDGSFFLYSKLTVDKSRWQQGNVFSCSVMHEALHNHYTQKS
LSLSPGGGGSGGGGSGGGGSGGGGSEVQLVESGGGLVQPGGSLRLSCAASGFNIKDTYIHWVRQAPGKGLEWVARIYPTNGYTRY
ADSVKGRFTISADTSKNTAYLQMNSLRAEDTAVYYCSRWGGDGFYAMDYWGQGTLVTVSSASTGGGGSGGGGSGGGGSSDIQMTQ
SPSSLSASVGDRVTITCRASQDVNTAVAWYQQKPGKAPKLLIYSASFLYSGVPSRFSGSRSGFTFTLTISSLQPEDFATYYCQQH
YTTPPTFGQGTKVEIKRT
SEQ ID NO. 57
MELAALCRWGLLLALLPPGAASTQVCTGTDMKLRLPASPETHLDMLRHLYQGCQVVQGNLELTYLPTNASLSFLQDIQEVQGYVL
IAHNQVRQVPLQRLRIVRGTQLFEDNYALAVLDNGDPLNNTTPVTGASPGGLRELQLRSLTEILKGGVLIQRNPQLCYQDTILWK
DIFHKNNQLALTLIDTNRSRACHPCSPMCKGSRCWGESSEDCQSLTRTVCAGGCARCKGPLPTDCCHEQCAAGCTGPKHSDCLAC
LHFNHSGICELHCPALVTYNTDTFESMPNPEGRYTFGASCVTACPYNYLSTDVGSCTLVCPLHNQEVTAEDGTQRCEKCSKPCAR
VCYGLGMEHLREVRAVTSANIQEFAGCKKIFGSLAFLPESFDGDPASNTAPLQPEQLQVFETLEEITGYLYISAWPDSLPDLSVF
QNLQVIRGRILHNGAYSLTLQGLGISWLGLRSLRELGSGLALIHHNTHLCFVHTVPWDQLFRNPHQALLHTANRPEDECVGEGLA
CHQLCARGHCWGPGPTQCVNCSQFLRGQECVEECRVLQGLPREYVNARHCLPCHPECQPQNGSVTCFGPEADQCVACAHYKDPPF
CVARCPSGVKPDLSYMPIWKFPDEEGACQPCPINCTHSCVDLDDKGCPAEQRASPLTGGGGSGGGGSGGGGSGGGGSQVQLQESG
PGDVKPSETLSLTCTVSGGSVSSGDYYWTWIRQSPGKGLEWIGHIYYSGNTNYNPSLKSRLTISIDTSKTTFSLQLSSVTGEDTA
IYYCVRDRVTGAFDIWGQGTTVTVSSASTGGGGSGGGGSGGGGSGGGGSDIQMTQSPSSLEASVGDRVTITCQASQDISNYLNWY
QQKPGKSPKLLIYDASNLETGVPDRFSGSGSGTDFTFTISSLQAEDEGTYFCQHFDHLPLAFGGGTKLEIKRTHHHHHH
SEQ ID NO. 58
MELAALCRWGLLLALLPPGAASNRPEDECVGEGLACHQLCARGHCWGPGPTQCVNCSQFLRGQECVEECRVLQGLPREYVNARHC
LPCHPECQPQNGSVTCFGPEADQCVACAHYKDPPFCVARCPSGVKPDLSYMPIWKFPDEEGACQPCPINCTHSCVDLDDKGCPAE
QRASPLTGGGGSGGGGSGGGGSGGGGSQVQLQESGPGDVKPSETLSLTCTVSGGSVSSGDYYWTWIRQSPGKGLEWIGHIYYSGN
TNYNPSLKSRLTISIDTSKTTFSLQLSSVTGEDTAIYYCVRDRVTGAFDIWGQGTTVTVSSASTGGGGSGGGGSGGGGSGGGGSD
IQMTQSPSSLAEASVGDRVTITCQASQDISNYLNWYQQKPGKSPKLLIYDASNLETGVPDRFSGSGSGTDFTFTISSLQAEDEGT
YFCQHFDHLPLAFGGGTKLEIKRTHHHHHH
SEQ ID NO. 63
MPPPRLLFFLLFLTPMEVRPEEPLVVKVEEDGNAVLQCLKGTSDGPTQQLTWSRESPLKPFLKLSLGLPGLGIHMRPLAIWLFIF
NVSQQMGGFYLCQPGPPSEAKWQPGWTVNVEGSGELFRWNVSDLGGLGCGLKNRSSEGPSSPSGKLMSPKLYVWAKDRPEIWEGE
PPCLPPRDSLNQSLSQDLTMAPGSTLWLSCGVPPDSVSRGPLSWTHVHPKGPKSLLSLELKDDRPARDMWVMETGLLLPRATAQD
AGKYYCHRGNLTMSFHLEITARPVLWHWLLRTGGWKGGGGWGGGGSGGGGSGGGGSEVQLQQSGAELVKPGASVKMSCKASGYTF
TSYNMHWVKQTPGQGLEWIGAIYPGNGDTSYNQKFKGKATLTADKSSSTAYMQLSSLTSEDSADYYCARSNY6YGSSYWFFDVWG
AGTTVTVSSGSTSGGGSGGGSGGGGSSDIVLTQSPAILSASPGEKVTMTCRASSSVNYMDWYQKKPGSSPKPWIYATSNLASGVP
ARFSGSGSGTSYSLTISRVEAEDAATYYCQQWSFNPPTFGGGTKLEIKHHHHHH
SEQ ID NO. 64
MHLLGPWLLLVLEYLAFSDSSKWVFEHPETLYAWEGACVWIPCTYRALDGDLESFILFHNPEYNKNTSKFDGTRLYESTKDGKVP
SEQKRVQFLGDKNKACTLSIHPVHLNDSGQLGLRMESKTEKWMERIHLNVSERPFPPHIQLPPEIQESQEVTLTCLLNFSCYGYP
IQLQWLLEGVPMRQAAVTSTSLTIKSVFTRSELKFSPQWSHHGKIVTCQLQDADGKFLSNDTVQLNVKHTPKLEIKVTPSDIAVR
EGDSVTMTCEVSSSNPEYTTVSWLKDGTSLKKQNTFTLNLREVTKDQSGKYCCQVSNDVGPGRSEEVFLQVQYAPEGGGGSGGGG
SGGGGSGGGGSDIQMTQTTSSLSASLGDRVTISCRASQDISKYLNWYQQKPDGTVKLLIHYTSRLHSGVPSRFSGSGSGTDYSLT
ISNLEQEDIATYFCQQGNTLPYTFGGGTKLEITGGGGSGGGGSGGGGSGGGGSEVKLQESGPGLVAPSQSLSVTCTVSGVSLPDY
GVSWIRQPPRKGLEWLGVIWGSETTYYNSALKSRLTIIKDNSKSQVFLKMNSLQTDDTAIYYCAKHYYYGGSYAMDYWGQGTSVT
VSSHHHHHH
SEQ ID NO. 65
MHLLGPWLLLLVLEYLAFSDSSKWVFEHPETLYAWEGACVWWIPCTYRADLGDLESFILFHNPEYNKNTSKFDGTRLYESTKDGK
VPSEQKRQFLGDKNKACTLSIHPVHLNDSGQLGLRMESKTEKWMERIHLNVSERPFPPHIQLPPEIQESQEVTLTCLLNFSCYGY
PIQLQWLLEGVPMRQAAVTSTSLTIKSVFTRSELKFSPQWSHHGKIVTCQLQDADGKFLSNDTVQLNVKHTPKLEIKVTPSDAIV
REGDSVTMTCEVSSSNPEYTTVSWLKDGTSLKKQNTFTLNLREVTKDQSGKYCCQVSNDVGPGRSEEVFLQVQYAPEGGGGSGGG
GSGGGGSGGGGSEVQLQQSGAELVKPGASVKMSCKASGYTFTSYNMHWVKQTPGQGLEWIGAIYPGNGDTSYNQKFKGKATLTAD
KSSSTAYMQLSSLTSEDSADYYCARSNYYGSSYFFDVWGAGTTVTVSSGSTSGGGSGGSGGGGSDIVLTQSPAILSASPGEKVTM
TCRASSSVNYMDWYQKKPGSSPKPWIYATSNLASGVPARFSGSGSGTSYSLTISRVEAEDAATYYCQQWSFNPPTFGGGTKLEIK
HHHHHH
SEQ ID NO. 67
MPPPRLLFFLLFLTPMEVRPEEPLVVKVEEGDNAVLQCLKGTSDGPTQQLTWSRESPLKPFLKLSLGLPGLGIHMRPLAIWLFIF
NVSQQMGGFYLCQPGPPSEKAWQPGWTVNVEGSGELFRWNVSDLGGLGCGLKNRSSEGPSSPSGKLMSPKLYVWAKDRPEIWEGE
PPCLPPRDSLNQSLSQDLTMAPGSTLWLSCGVPPDSVSRGPLSWTHVHPKGPKSLLSLELKDDRPARDMWVMETGLLLPRATAQD
AGKYYCHRGNLTMSFHLEITARPVLWHWLLRTGGWKGGGGSGGGGSGGGGSGGGGSDILMTQSPSSMSVSLGDTVSITCHSSQDI
NSNIGWLQQRPGKSFKGLIYHGTNLDDEVPSRFSGSGSGADYSLTISSLESEDFADYYCVQYAQFPWTFGGGTKLEIKRGGGGSG
GGGSGGGGSGGGGSMRVLILLWLFTAFPGVLSDVQLQESGPSLVKPSQSLSLTCTVTGYSITSDFAWNWIRQFPGNKLEWMGYIS
YSGNTRYNPSLKSRISITRDTSKNQFFLQLNSVTIEDTATYYCVTAGRGFPYWGQGTLVTVSAHHHHHH
SEQ ID NO. 68
MHLLGPWLLLVLEYLAFSDSSKWVFEHPETLYAWEGACVWIPCTYRALDGDLESFILFHNPEYNKNTSKFDGTRLYESTKDGKVP
SEQKRVQFLGDKNKACTLSIHPVHLNDSGQLGLRMESKTEKWMERIHLNVSERPFPPHIQLPPEIQESQEVTLTCLLNFSCYGYP
IQLQWLLEGVPMRQAAVTSTSLTIKSVFTRSELKFSPQWSHHGKIVTCQLQDADGKFLSNDTVQLNVKHTPKLEIKVTPSDAIVR
EGDSVTMTCEVSSSNPEYTTVSWLKDGTSLKKQNTFTLNLREVTKDQSGKYCCQVSNDVGPGRSEEVFLQVQYAPEGGGGSGGGG
SGGGGSGGGGSDILMTQSPSSMSVSLGDTVSITCHSSQDINSNIGWLQQRPGKSFKGLIYHGTNLDDEVPSRFSGSGSGADYSLT
ISSLESEDFADYYCVQYAQFPWTFGGGTKLEIKRGGGGSGGGGSGGGGSGGGGSMRVLILLWLFTAFPGVLSDVQLQESGPSLVK
PSQSLSLTCTVTGYSITSDFAWNWIRQFPGNKLEYMGYISYSGNTRYNPSLKSRISITRDTSKNQFFLQLNSVTIEDTATYYCVT
AGRGFPYWGQGTLVTVSAHHHHHH
SEQ ID NO. 71
MLRLLLALNLFPSIQVTGDIQMTQTTSSLSASLGDRVTISCRASQDISKYLNWYQQKPDGTVKLLIYHTSRLHSGVPSRFSGSGS
GTDYSLTISNLEQEDIATYFCQQGNTLPYTFGGGTKLEITGGGGSGGGGSGGGGSGGGGSEVKLQESGPGLVAPSQSLSVTCTVS
GVSLPDYGVSWIRQPPRKGLEWLGVIWGSETTYYNSALKSRLTIIKDNSKSQVFLKMNSLQTDDTAIYYCAKHYYYGGSYAMDYW
GQGTSVTVSSDYKDDDDKIEVMYPPPYLDNEKSNGTIIHVKGKHLCPSPLFPGPSKPFWVLVVVGGVLACYSLLVTVAFIIFWVR
SKRSRLLHSDYMNMTPRRPGPTRKHYQPYAPPRDFAAYRSKRGRKKLLYIFKQPFMRPVQTTQEEDGCSCRFPEEEEGGCELRVK
FSRSADAPAYQQGQNQLYNELNLGRREEYDVLDKRRGRDPEMGGKPQRRKNPQEGLYNELQKDKMAEAYSEIGMKGERRRGKGHD
GLYQGLSTATKDTYDALHMQALPPR
SEQ ID NO. 72
MLRLLLALNLFPSIQVTGDIQMTQTTSSLSASLGDRVTISCRASQDISKYLNWYQQKPDGTVKLLIYHTSRLHSGVPSRFSGSGS
GTDYSLTISNLEQEDIATYFCQQGNTLPYTFGGGTKLEITGGGGSGGGGSGGGGSGGGGSEVKLQESGPGLVAPSQSLSVTCTVS
GVSLPDYGVSWIRQPPRKGLEWLGVIWGSETTYYNSALKSRLTIIKDNSKSQVFLKMNSLQTDDTAIYYCAKHYYYGGSYAMDYW
GQGTSVTVSSDYKDDDDKIEVMYPPPYLDNEKSNGTIIHVKGKHLCPSPLFPGPSKPFWVLVVVGGVLACYSLLVTVAFIIFWVR
SKRSRLLHSDYMNMTPRRPGPTRKHYQPYAPPRDFAAYRSKRGRKKLLYIFKQPFMRPVQTTQEEDGCSCRFPEEEEGGCELRVK
FSRSADAPAYQQGQNQLYNELNLGRREEYDVLDKRRGRDPEMGGKPQRRKNPQEGLYNELQKDKMAEAYSEIGMKGERRRGKGHD
GLYQGLSTATKDTYDALHMQALPPR
SEQ ID NO. 73
MPPPRLLFFLLFLTPMEVRPEEPLVVKVEEGDNAVLQCLKGTSDGPTQQLTWSRESPLKPFLKLSLGLPGLGIHMRPLAIWLFIF
NVSQQMGGFYLCQPGPPSEKAWQPGWTVNVEGSGELFRWNVSDLGGLGCGLKNRSSEGPSSPSGKLMSPKLYVWAKDRPEIWEGE
PPCLPPRDSLNQSLSQDLTMPAGSTLWLSCGVPPDSVSRGPLSWTHVHPKGPKSLLSLELKDDRPARDMWVMETGLLLPRATAQD
AGKYYCHRGNLTMSFHLEITARPGGGGSGGGGSGGGGSGGGGSEVQLVESGGGLVQPGGSLRLSCAASGFNIKDTYIHWVRQAPG
KGLEWVARIYPTNGYTRYADSVKGRFTISADTSKNTAYLQMNSLRAEDTAVYYCSRWGGDGFYAMDYWGQGTLVTVSSASTGGGG
SGGGGSGGGGSDIQMTQSPSSLSASVGDRVTITCRASQDVNTAVAWYQQKPGKAPKLLIYSASFLYSGVPSRFSGSRSGTDFTLT
ISSLQPEDFATYYCQQHYTTPPTFGQGTKVEIKRTHHHHHH
SEQ ID NO. 74
MPPPRLLFFLLFLTPMEVRPEEPLVVKVEEGDNAVLQCLKGTSDGPTQQLTWSRESPLKPFLKLSLGLPGLGIHMRPLAIWLFIF
NVSQQMGGFYLCQPGPPSEKAWQPGWTVNVEGSGELFRWNVSDLGGLGCGLKNRSSEGPSSPSGKLMSPKLYVWAKDRPEIWEGE
PPCLPPRDSLNQSLSQDLTMAPGSTLWLSCGVPPDSVSRGPLSWTHVHPKGPKSLLSLELKDDRPARDMWVMETGLLLPRATAQD
AGKYYCHRGNLTMSFHLEITARPGGGGSGGGGSGGGGSGGGGSEVQLVESGGGLVQPGGSLRLSCAASGFNIKDTYIHWVRQAPG
KGLEWVARIYPTNGYTRYADSVKGRFTISADTSKNTAYLQMNSLRAEDTAVYYCSRWGGDGFYAMDYWGQGTLVTVSSASTGGGG
SGGGGSGGGGSDIQMTQSPSSLSASVGDRVTITCRASQDVNTAVAWYQQKPGKAPKLLIYSASFLYSGVPSRFSGSRSGTDFTLT
ISSLQPEDFATYYCQQHYTTPPTFGQGTKVEIKRTHHHHHH
SEQ ID NO. 75
MPPPRLLFFLLFLTPMEVRPEEPLVVKVEEGDNAVLQCLKGTSDGPTQQLTWSRESPLKPFLKLSLGLPGLGIHMRPLAIWLFIF
NVSQQMGGFYLCQPGPPSEKAWQPGWTVNVEGSGELFRWNVSDLGGLGCGLKNRSSEGPSSPSGKLMSPKLYVWAKDRPEIWEGE
PPCLPPRDSLNQSLSQDLTMAPGSTLWLSCGVPPDSVSRGPLSWTHVHPKGPKSLLSLELKDDRPARDMWVMETGLLLPRATAQD
AGKYYCHRGNLTMSFHLEITARPGGGGSGGGGSGGGGSGGGGSEVQLVESGGGLVQPGGSLRLSCAASGFNIKDTYIHWVRQAPG
KGLEWVARIYPTNGYTRYADSVKGRFTISADTSKNTAYLQMNSLRAEDTAVYYCSRWGGDGFYAMDYWGQGTLVTVSSASTGGGG
SGGGGSGGGGSDIQMTQSPSSLSASVGDRVTITCRASQDVNTAVAWYQQKPGKAPKLLIYSASFLYSGVPSRFSGSRSGTDFTLT
ISSLQPEDFATYYCQQHYTTPPTFGQGTKVEIKRTHHHHHH
SEQ ID NO. 76
MPPPRLLFFLLFLTPMEVRPEEPLVVKVEEDGNAVLQCLKGTSDGPTQQLTWSREDPLKPFLKLSLGLPGLGIHMRPLAIWLFIF
NVSQQMGGFYLCQPGPPSEKAWQPGWTVNVEGSGELFRWNVSDLGGLGCGLKNRSSEGPSSPSGKLMSPKLYVWAKDRPEIWEGE
PPCLPPRDSLNQSLSQDLTMAPGSTLWLSCGVPPDSVSRGPLSWTHVHPKGPKSLLSLELKDDRPARDMWVMETGLLLPRATAQD
AGKYYCHRGNLTMSFHLEITARPGGGGSGGGGSGGGGSGGGGSEVQLVESGGGLVQPGGSLRLSCAASGFNIKDTYIHWVRQAPG
KGLEWVARIYPTNGYTRYADSVKGRFTISADTSKNTAYLQMNSLRAEDTAVYYCSRWGGDGFYAMDYWGQGTLVTVSSASTGGGG
SGGGGSGGGGSDIQMTQSPSSLSASVGDRVTITCRASQDVNTAVAWYQQKPGKAPKLLIYSASFLYSGVPSRFSGSRSGTDFTLT
ISSLQPEDFATYYCQQHYTTPPTFGQGTKVEIKRTHHHHHH
SEQ ID NO. 77
MPPPRLLFFLLFLTPMEVRPEEPLVVKVEEGDNAVLQCLKGTSDGPTQQLTWSRESPLKPFLKLSLGLPGLGIHMRPLAIWLFIF
NVSQQMGGFYLCQPGPPSEKAWQPGWTVNVEGSGELFRWNVSDLGGLGCGLKNRSSEGPSSPSGKLMSPKLYVWAKDRPEIWEGE
PPCLPPRDSLNQSLSQDLTMAPGSTLWLSCGVPPDSVSRGPLSWTHVHPKGPKSLLSLELKDDRPARDMWVMETGLLLPRATAQD
AGKYYCHRGNLTMSFHLEITARPGGGGSGGGGSGGGGSGGGGSEVQLVESGGGLVQPGGSLRLSCAASGFNIKDTYIHWVRQAPG
KGLEWVARIYPTNGYTRYADSVKGRFTISADTSKNTAYLQMNSLRAEDTAVYYCSRWGGDGFYAMDYWGQGTLVTVSSASTGGGG
SGGGGSGGGGSDIQMTQSPSSLSASVGDRVTITCRASQDVNTAVAWYQQKPGKAPKLLIYSASFLYSGVPSRFSGSRSGTDFTLT
ISSLQPEDFATYYCQQHYTTPPTFGQGTKVEIKRTHHHHHH
SEQ ID NO. 78
MDFQVQIFSFLLISASVIMSRMQAVKLQESGAELVKGPASVKMSCKASGYTFTSYNMHWVKQTPGQGLEWIGAIYPGNGDTSYNQ
KFKGKATLTADKSSSTAYMQLSSLTSEDSADYYCARSNYYGSSYWFFDVWGQGTTVTVSSGGGGSGGGGSGGGGSDIELTQSPTI
LSASPGEKVTMTCRASSSVNYMDWYQKKPGSSPKPWIYATSNLASGVPARFSGSGSGTSYSLTISRVEAEDAATYYCQQWSFNPP
TFGGGTKLEIKRAAAGDPAEPKSPDKTHTCPPCPAPELLGGPSVFLFPPKPKDTLMISRTPEVTCVVVDVSHEDPEVKFNWYVDG
VEVHNAKTKPREEQYNSTYRVVSVLTVLHQDWLNGKEYKCKVSNKALPAPIEKTISKAKGQPREPQVYTLPPSREEMTKNQVSLT
CLVKGFYPSDIAVEWESNGQPENNYKTTPPVLDSDGSFFLYSKLTVDKSRWQQGNVFSCSVMHEALHNHYTQKSLSLSPG
SEQ ID NO. 78
MDFQVQIFSFLLISASVIMSRMAQVKLQESGAELVKPGASVKMSCKASGYTFTSYNMHWVKQTPGQGLEWIGAIYPGNGDTSYNQ
KFKGKATLTADKSSSTAYMQLSSLTSEDSADYYCARSNYYGSSYWFFDVWGQGTTVTVSSGGGGSGGGGSGGGGSDIELTQSPTI
LSASPGEKVTMTCRASSSVNYMDWYQKKPGSSPKPWIYATSNLASGVPARFSGSGSGTSYSLTISRVEAEDAATYYCQQWSFNPP
TFGGGTKLEIKRAAAHHHHHH
SEQ ID NO. 80
MDFQVQIFSFLLISASVIMSRDIELTQSPTILSASPGGEKVTMTCRASSSVMYMDWYQKKPGSSPKPWIYATSNLASGVPARFSG
SGSGTSYSLTISRVEAEDAATYYCQQWSFNPPTFGGGTKLEIKRGGGGSGGGGSGGGGSMAQVKLQESGAELVKPGASVKMSCKA
SGYTFTSYNMHWVKQTPGQGLEWIGAIYPGNGDTSYNQKFKGKATLTADKSSSTAYMQLSSLTSEDSADYYCARSNYYGSSYWFF
DVWGQGTTVTVSSAAAGDPAEPKSPDKTHTCPPCPAPELLGGPSVFLFPPKPKDTLMISRTPEVTCVVVDVSHEDPEVKFNWYVD
GVEVHNAKTKPREEQYNSTYRVVSVLTVLHQDLWNGKEYKCKVSNKALPAPIEKTISKAKGEPREPQVYTLPPSREEMTKNQVSL
TCLVKGFYPSDIAVEWESNGQPENNYKTTPPVLDSDGSFFLYSKLTVDKSRWQQGNVFSCSVMHEALHNHYTQKSLSLSPG
SEQ ID NO. 81
MDFQVQIFSFLLISASVIMSRDIELTQSPTILSASPGEKVTMTCRASSSVNYMDWYQKKPGSSPKPWIYATSNLASGVPARFSGS
GSGTSYSLTISRVEAEDAATYYCQQWSFNPPTFGGGTKLEIKRGGGGSGGGGSGGGGSMAQVKLQESGAELVKPGASVKMSCKAS
GYTFTSYNMHWVKQTPGQGLEWIGAIYPGNGDTSYNQKFKGKATLTADKSSSTAYMQLSSLTSEDSADYYCARSNYYGSSYWFFD
VWGQGTTVTVSSAAAHHHHHH
SEQ ID NO. 82
MPPPRLLFFLLFLTPMEVRPEEPLVVKVEEGDNAVLQCLKGTSDGPTQQLTWSRESPLKPFLKLSLGLPGLGIHMRPLAIWLFIF
NVSQQMGGFYLCQPGPPSEKAWQPGWTVNVEGSGELFRWNVSDLGGLGCGLKNRSSEGPSSPSGKLMSPKLYVWAKDRPEIWEGE
PPCLPPRDSLNQSLSQDLTMAPGSTLWLSCGVPPDSVSRGPLSWTHVHPKGPKSLLSLELKDDRPARDMWVMETGLLLPRATAQD
AGKYYCHRGNLTMSFHLEITARPGGGGSGGGGSGGGGSGGGGSMAQVKLQESGAELVKPGASVKMSCKASGYTFTSYNMHWVKQT
PGQGLEWIGAIYPGNGDTSYNQKFKGKATLTADKSSSTAYMQLSSLTSEDSADYYCARSNYYGSSYWFFDVWGQGTTVTVSSGGG
GSGGGGSGGGGSDIELTQSPTILSASPGEKVTMTCRASSSVNYMDWYQKKPGSSPKPWIYATSNLASGVPARFSGSGSGTSYSLT
ISRVEAEDAATYYCQQWSFNPPTFGGGTKLEIKRAAAGDPAEPKSPDKTHTCPPCPAPELLGGPSVFLFPPKPKDTLMISRTPEV
TCVVVDVSHEDPEVKFNWYVDGVEVHNAKTKPREEQYNSTRYVVSVLTVLHQDWLNGKEYKCKVSNKALPAPIEKTISKAKGQPR
EPQVYTLPPSREEMTKNQVSLTCLVKGFYPSDIAVEWESNGQPENNYKTTPPVLDSDGSFFLYSKLTVDKSRWQQGNVFSCSVMH
EALHNHYTQKSLSLSPG
SEQ ID NO. 83
MPPPRLLFFLLFLTPMEVRPEEPLVVKVEEGDNAVLQCLKGTSDGPTQQLTWSRESPLKPFLKLSLGLPGLGIHMRPLAIWLFIF
NVSQQMGGFYLCQPGPPSEKAWQPGWTVNVEGSGELFRWNVSDLGGLGCGLKNRSSEGPSSPSGKLMSPKLYVWAKDRPEIWEGE
PPCLPPRDSLNQSLSQDLTMAPGSTLWLSCGVPPDSVSRGPLSWTHVHPKGPKSLLSLELKDDRPARDMWVMETGLLLPRATAQD
AGKYYCHRGNLTMSFHLEITARPGGGGSGGGGSGGGGSGGGGSMAQVKLQESGAELVKPGASVKMSCKASGYTFTSYNMHWVKQT
PGQGLEWIGAIYPGNGDTSYNQKFKGKATLTADKSSSTAYMQLSSLTSEDSADYYCARSNYYGSSYWFFDVWGQGTTVTVSSGGG
GSGGGGSGGGGSDIELTQSPTILSASPGEKVTMTCRASSSVNYMDWYQKKPGSSPKPWIYATSNLASGVPARFSGSGSGTSYSLT
ISRVEAEDAATYYCQQWSFNPPTFGGGTKLEIKRAAAHHHHHH
SEQ ID NO. 84
MPPPRLLFFLLFLTPMEVRPEEPLVVKVEEDGNAVLQCLKGTSDGPTQQLTWSRESPLKPFLKLSLGLPGLGIHMRPLAIWLFIF
NVSQQMGGFYLCQPGPPSEAKWQPGWTVNVEGSGELFRWNVSDLGGLGCGLKNRSSEGPSSPSGKLMSPKLYVWAKDRPEIWEGE
PPCLPPRDSLNQSLSQDLTMAPGSTLWLSCGVPPDSVSRGPLSWTHVHPKGPKSLLSLELKDDRPARDMWVMETGLLLPRATAQD
AGKYYCHRGNLTMSFHLEITARPGGGGSGGGGSGGGGSGGGGSDIELTQSPTILSASPGEKVTVTCRASSSVNYMDWYQKKPGSS
PKPWIYATSNLASGVPARFSGSGSGTSYSLTISVEAEDAATYYCQQWSFNPPTFGGGTKLEIKRGGGGSGGGGSGGGGSMAQVKL
QESGAELVKPGASVKMSCKASGYTFTSYNMHWVKQTPGQGLEWIGAIYPGNGDTSYNQKFKGKATLTADKSSSTAYMQLSSLTSE
DSADYYCARSNYYGSSYWFFDVWGQGTTVTVSSAAAGDPAEPKSPDKTHTCPPCPAPELLGGPSVFLFPPKPKDTLMISRTPEVT
CVVVDVSHEDPEVKFNWYVDGVEVHNAKTKPREEQYNSTYRVVSVLTVLHQDWLNGKEYKCKVSNKALPAPIEKTISKAKGQPRE
PQVYTLPPSREEMTKNQVSLTCLVKGFYPSDIAVEWESNGQPENNYKTTPPVLDSDGSFFLYSKLTVDKSRWQQGNVFSCSVMHE
ALHNHYTQKSLSLSPG
SEQ ID NO. 85
MPPPRLLFFLLFLTPMEVRPEEPLVVKVEEGDNAVLQCLKGTSDGPTQQLTWSRESPLKPFLKLSLGLPGLGIHMRPLAIWLFIF
NVSQQMGGFYLCQPGPPSEKAWQPGWTVNVEGSGELFRWNVSDLGGLGCGLKNRSSEGPSSPSGKLMSPKLYVWAKDRPEIWEGE
PPCLPPRDSLNQSLSQDLTMAPGSTLWLSCGVPPDSVSRGPLSWTHVHPKGPKSLLSLELKDDRPARDMWVMETGLLLPRATAQD
AGKYYCHRGNLTMSFHLEITARPGGGGSGGGGSGGGGSGGGGSDIELTQSPTILSASPGEKVTMTCRASSSVNYMDWYQKKPGSS
PKPWIYATSNLASGVPARFSGSGSGTSYSLTISRVEAEDAATYYCQQWSFNPPTFGGGTKLEIKRGGGGSGGGGSGGGGSMAQVK
LQESGAELVKPGASVKMSCKASGYTFTSYNMHWVKQTPGQGLEWIGAIYPGNGDTSYNQKFKGKATLTADKSSSTAYMQLSSLTS
EDSADYYCARSNYYGSSYWFFDVWGQGTTVTVSSAAHHHHHH
SEQ ID NO. 86
MPPPRLLFFLLFLTPMEVRPEEPLVVKVEEGDNAVLQCLKGTSDGPTQQLTWSRESPLKPFLKLSLGLPGLGIHMRPLAIWLFIF
NVSQQMGGFYLCQPGPPSEKAWQPGWTVNVEGSGELFRWNVSDLGGLGCGLKNRSSEGPSSPSGKLMSPKLYVWAKDRPEIWEGE
PPCLPPRDSLNQSLSQDLTMAPGSTLWLSCGVPPDSVSRGPLSWTHVHPKGPKSLLSLELKDDRPARDMWVMETGLLLPRATAQD
AGKYYCHRGNLTMSFHLEITARPGGGGSGGGGSGGGGSGGGGSQVQLVQSGAEDKKPGESVKISCKASGYTFTNYGMNWVRQAPG
QGLKWMGWINTYTGESTYADDFKGRFAFSLDTSASTAYLQLSSLRGEDTAVYFCARFAIKGDYWGQGTTVTVSSASTGGGGSGGG
GSGGGGSGGGGSDIVMTQSPLSLEVSPGEPASISCRSTKSLLHSDGITYLYWYLQKPGQSPQLLIYQLSNLASGVPDRFSSSGSG
TDFTLKISRVEAEDEGTYYCAQNLEIPRTFGQGTKLEIKRTHHHHHH
SEQ ID NO. 87
MPPPRLLFFLLFLTPMEVRPEEPLVVKVEEGDNAVLQCLKGTSDGPTQQLTWSRESPLKPFLKLSLGLPGLGIHMRPLAIWLFIF
NVSQQMGGFYLCQPGPPSEKAWQPGWTVNVEGSGELFRWNVSDLGGLGCGLKNRSSEGPSSPSGKLMSPKLYVWAKDRPEIWEGE
PPCLPPRDSLNQSLSQDLTMPAGSTLWLSCGVPPDSVSRGPLSWTHVHPKGPKSLLSLELKDDRPARDMWVEMTGLLLPRATAQD
AGKYYCHRGNLTMSFHLEITARPGGGGSGGGGSGGGGSGGGGSWVQLVQSGAEDVKPDASVKLSCKASGYTFTDYYMHWVRQAPG
QGLEWMGRVNPNRRGTTYNQKFEGRVTMTTDTSTSTAYMQLSSLRGEDTAVYYCARANWLDYWGQGTTVTVSSASTGGGGSGGGG
SGGGGSGGGGSDIQMTQSPSSLEASVGDRVTITCSVSSSVSSIYLHWYQQKPGKSPKLLIYSTSNLASGVPSRFSGSGSGTDFTL
TISSLQAEDEGTYYCQVYSGYPLTFGGGTKLEIKRTHHHHHH
SEQ ID NO. 88
MPPPRLLFFLLFLTPMEVRPEEPLVVKVEEGDNAVLQCLKGTSDGPTQQLTWSRESPLKPFLKLSLGLPGLGIHMRPLAIWLFIF
NVSQQMGGFYLCQPGPPSEKAWQPGWTVNVEGSGELFRWNVSDLGGLGCGLKNRSSEGPSSPSGKLMSPKLYVWAKDRPEIWEGE
PPCLPPRDSLNQSLSQDLTMAPGSTLWLSCGVPPDSVSRGPLSWTHVHPKGPKSLLSLELKDDRPARDMWVMETGLLLPRATAQD
AGKYYCHRGNLTMSFHLEITARPGGGGSGGGGSGGGGSGGGGSQVQLQESGPGDVKPSETLSLTCTVSGGSVSSGDYYWTWIRQS
PGKGLEWIGHIYYSGNTNYNPSLKSRLTISIDTSKTTFSLQLSSVTGEDTAIYYCVRDRVTGAFDIWGQGTTVTVSSASTGGGGS
GGGGSGGGGSGGGGSDIQMTQSPSSLEASVGDRVTITCQASQDISNYLNWYQQKPGKSPKLLIYDASNLETGVPDRFSGSGSGTD
FTFTISSLQAEDEGTYFCQHFDHLPLAFGGGTKLEIKRTHHHHHH
SEQ ID NO. 89
METDTLLLWVLLLWVPGSTGDIVLTQSPPSLAMSLGKRATISCRASESVTILGSHLIHWYQQKPGQPPTLLIQLASNVQTGVPAR
FSGSGSRTDFTLTIDPVEEDDVAVYYCLQSRTIPRTFGGGTKLEIKGSTSGSGKPGSGEGSTKGQIQLVQSGPELKKPGETVKIS
CKASGYTFTDYSINWVKRAPGKGLKWMGWINTETREPAYAYDFRGRFAFSLETSASTAYLQINNLKYEDTATYFCALDYSYAMDY
WGQGTSVTVSSGGGGSGGGGSGGGGSHHHHHH
SEQ ID NO. 90
MEFGLSWVFLVALFRGVQCQIQLVQSGPELKKPGETVKISCSASGYTFTDYSINWVKRAPGKGLKWMGWINTETREPAYAYDFRG
RFAFSLETSASTAYLQINNLKYEDTATYFCALDYSYAMDYWGQGTSVTVSSGSTSGSGKPGSGEGSTKGDIVLTQSPPSLAMSLG
KRATISCRASESVTILGSHLIHWYQQKPGQPPTLLIQLASNVQTGVPARFSGSGSRTDFTLTIDPVEEDDVAVYYCLQSRTIPRT
FGGGTKLEIKGGGGSGGGGSGGGGSHHHHHH
SEQ ID NO. 91
MPPPRLLFFLLFLTPMEVRPEEPLVVKVEEGDNAVLQCLKGTSDGPTQQLTWSRESPLKPFLKLSLGLPGLGIHMRPLAIWLFIF
NVSQQMGGFYLCQPGGPSEKAWQPGWTVNVEGSGELFRWNVSDLGGLGCGLKNRSSEGPSSPSGKLMSPKLYVWAKDRPEIWEGE
PPCLPPRDSLNQSLSQDLTMAPGSTLWLSCGVPPDSVSRGPLSWTHVHPKGPKSLLSLELKDDRPARDMWVMETGLLLPRATAQD
AGKYYCHRGNLTMSFHLEITARPGGGGSGGGGSGGGGSGGGGSDIVLTQSPPSLAMSLGKRATISCRASESVTILGSHLIHWYQQ
KPGQPPTLLIQLASNVQTGVPARFSGSGSRTDFTLTIDPVEEDDVAVYYCLQSRTIPRTFGGGTKLEIKGSTSGSGKPGSGEGST
KGQIQLVQSGPELKKPGETVKISCKASGYTFTDYSINWVKRAPGKGLKWMGWINTETREPAYAYDFRGRFAFSLETSASTAYLQI
NNLKYEDTATYFCALDYSYAMDYWGQGTSVTVSSGGGGSGGGGSGGGGSHHHHHH
SEQ ID NO. 92
MPPPRLLFFLLFLTPMEVRPEEPLVVKVEEGDNAVLQCLKGTSDGPTQQLTWSRESPLKPFLKLSLGLPGLGIHMRPLAIWLFIF
NVSQQMGGFYLCQPGPPSEKAWQPGWTVNVEGSGELFRWNVSDSGGLGCGLKNRSSEGPSSPSGKLMSPKLYVWAKDRPEIWEGE
PPCLPPRDSLNQSLSQDLTMAPGSTLWLSCGVPPDSVSRGPLSWTHVHPKGPKSLLSLELKDDRPARDMWVEMTGLLLPRATAQD
AGKYYCHRGNLTMSFHLEITARPGGGGSGGGGSGGGGSGGGGSQIQLVQSGPELKKPGETVKISCKASGYTFTDYSINWVKRAPG
KGLKWMGWINTETREPAYAYDFRGRFAFSLETSASTAYLQINNLKYEDTATYFCALDYSYAMDYWGQGTSVTVSSGSTSGSGKPG
SGEGSTKGDVILTQSPPSLAMSLGKRATISCRASESVTILGSHLIHWYQQKPGQPPTILLIQLASNVQTGVPARFSGSGSRTDFT
LTIDPVEEDDVAVYYCLQSRTIPRTFGGGTKLEIKGGGGSGGGGSGGGGSHHHHHH
SEQ ID NO. 93
MPPPRLLFFLLFLTPMEVRPEEPLVVKVEEDGDNALQCLKGTSDGPTQQLTWSRESPLKPFLKLSLGLPGLGIHMRPLAIWLFIF
NVSQQMGGFYLCQPGPPSEKAWQPGWTVNVEGSGELFRWNVSDLGGLGCGLKNRSSEGPSSPSGKLMSPKLYVWAKDRPEIWEGE
PPCLPPRDSLNQSLSQDLTMAPGSTLWLSCGVPPDSVSRGPLSWTHVHPKGPKSLLSLELKDDRPARDMWVMETGLLLPRATAQD
AGKYYCHRGNLTMSFHLEITARPDKTHTCPPCPAPELLGGPSVFLFPPKPKDTLMISRTPEVTCVVVDVSHEDPEVKFNWYVDGV
EVHNAKTKPREEQYNSTYRVVSVLTVLHQDWLNGKEYKCKVSNAKLPAPIEKTISKAKGQPREPQVYTLPPSREEMTKNQVSLTC
LVKGFYPSDIAVEWESNGQEPNNYKTTPPVLDSDGSFFLYSKLTVDKSRWQQGNVFSCSVMHEALHNHYTQKSLSLSPGGGGGSG
GGGSGGGGSGGGGSEVQLVESGGGLVQPGGSLRLSCAASGFNIKDTYIHWVRQAPGKGLEWVARIYPTNGYTRYADSVKGRFTIS
ADTSKNTAYLQMNSLRAEDTAVYYCSRWGGDGFYAMDYWGQGTLVTVSSASTGGGGSGGGGSGGGGSDIQMTQSPSSLSASVGDR
VTITCRASQDVNTAVAWYQQKPGKAPKLLIYSASFLYSGVPSRFSGSRSGTDFTLTISSLQPEDFATYYCQQHYTTPPTFGQGTK
VEIKRT
SEQ ID NO. 94
MPPPRLLFFLLFLTPMEVRPEEPLVVKVEEGDNAVLQCLKGTSDGPTQQLTWSRESPLKPFLKLSLGLPGLGIHMRPLAIWLFIF
NVSQQMGGFYLCQPGPPSEKAWQPGWTVNVEGSGELFRWNVSDLGGLGCGLKNRSSEGPSSPSGKLMSPKLYVWAKDRPEIWEGE
PPCLPPRDSLNQSLSQDLTMAPGSTLWLSCGVPPDSVSRGPLSWTHVHPKGPKSLLSLELKDDRPARDMWVMETGLLLPRATAQD
AGKYYCHRGNLTMSFHLEITARPGGGGSGGGGSGGGGSGGGGSEVQLVESGGGLVQPGGSLRLSCAASGFNIKDTYIHWVRQAPG
KGLEWVARIYPTNGYTRYADSVKGRFTISADTSKNTAYLQMNSLRRAEDTAVYYCSRWGGDGFYAMDYWGQGTLVTVSSASTGGG
GSGGGGSGGGGSDIQMTQSPSSLSASVGDRVTITCRASQDVNTAVAWYQQKPGKAPKLLIYSASFLYSGVPSRFSGSRSGTDFTL
TISSLQPEDFATYYCQQHYTTPPTFGQGTKVEIKRTGGGGSGGGGSGGGGSGGGGSQVQLQESGPGDVKPSETLSLTCTVSGGSV
SSGDYYWTWIRQSPGKLGEWIGHIYYSGNTNYNPSLKSRLTISIDTSKTTFSLQLSSVTGEDTAIYYCVRDRVTGAFIDWGQGTT
VTVSSASTGGGGSGGGGSGGGGSGGGGSDIQMTQSPSSLEASVGDRVTITCQASQDISNYLNWYQQKPGKSPKLLIYDASNLETG
VPDRFSGSGSGTDFTFTISSLQAEDEGTYFCQHFDHLPLAFGGGTKLEIKRTGGGGSHHHHHH
SEQ ID NO. 95
MPPPRLLFFLLFLTPMEVRPEEPLVVKVEEDGNAVLQCLKGTSDGPTQQLTWSRESPLKPFLKLSLGLPGLGIHMRPLAIWLFIF
NVSQQMGGFYLCQPGPPSEKAWQPGWTVNVEGSGELFRWNVSDLGGLGCGLKNRSSEGPSSPSGKLMSPKLYVWAKDRPEIWEGE
PPCLPPRDSLNQSLSQDLTMAPGSTLWLSCGVPPDSVSRGPLSWTHVHPKGPKSLLSLELKDDRPARDMWVMETGLLLPRATAQD
AGKYYCHRGNLTMSFHLEITARPGGGGSGGGGSGGGGSGGGGSEVQLVESGGGLVQPGGSLRLSCAASGFNIKDTYIHWVRQAPG
KGLEWVARIYPTNGYTRYADSVKGRFTISADTSKNTAYLQMNSLRAEDTAVYYCSRWGGDGFYAMDYWGQGTLVTVSSASTGGGG
SGGGGSGGGGSDIQMTQSPSSLSASVGDRVTITCRASQDVNTAVAWYQQKPGKAPKLLIYSASFLYSGVPSRFSGSRSGTDFTLT
ISSLQPEDFATYYCQQHYTTPPTFGQGTKVEIKRTGGGGSGGGGSGGGGSGGGGSDIQMTQSPSSLEASVGDRVTITCQASQDIS
NYLNWYQQKPGKSPKLLIYDASNLETGVPDRFSGSGSGTDFTFTISSLQAEDEGTYFCQHFDHLPLAFGGGTKLEIKRTGGGGSG
GGGSGGGGSGGGGSQVQLQESGPGDVKPSETLSLTCTVSGGSVSSGDYYWTWIRQSPGKGLEWIGHIYYSGNTNYNPSLKSRLTI
SIDTSKTTFSLQLSSVTGEDTAIYYCVRDRVTGAFDIWGQGTTVTVSSASTGGGGSHHHHHH
SEQ ID NO. 96
MEFGLSWVFLVALFRGVQCEVQLVESGGGLVQPGGSLRLSCAASGFNIKDTYIHWVRQAPGKGLEWVARIYPTNGYTRYADSVKG
RFTISADTSKNTAYLQMNSLRAEDTAVYYCSRWGGDGFYAMDYWGQGTLVTVSSASTGGGGSGGGGSGGGGSDIQMTQSPSSLSA
SVGDRVTITCRASQDVNTAVAWYQQKPGKAPKLLIYSASFLYSGVPSRFSGSRSGTDFTLTISSLQPEDFATYYCQQHYTTPPTF
GQGTKVEIKRTGGGGSGGGGSGGGGSGGGGSQVQLQESGPGDVKPSETLSLTCTVSGGSVSSGDYYWTWIRQSPGKGLEWIGHIY
YSGNTNYNPSLKSRLTISIDTSKTTFSLQLSSVTGEDTAIYYCVRDRVTGAFDIWGQGTTVTVSSASTGGGGSGGGGSGGGGSGG
GGSDIQMTQSPSSLEASVGDRVTITCQASQDISNYLNWYQQKPGKSPKLLIYDADNLETGVPDRFSGSGSGTDFTFTISSLQAED
EGTYFCQHFDHLPLAFGGGTKLEIKRTGGGGSHHHHHH
SEQ ID NO. 97
MEFGLSWVFLFVALFRGVQCEVQLVESGGGLVQPGGSLRLSCAASGFNIKDTYIHWVRQAPGKGLEWVARIYPTNGYTRYADSVK
GRFTISADTSKNTAYLQMNSLRAEDTAVYYCSRWGGDGFYAMDYWGQGTLVTVSSASTGGGGSGGGGSGGGGSDIQMTQSPSSLS
ASVGDRVTITCRASQDVNTAVAWYQQKPGKAPKLLIYSASFLYSGVPRFSGSRSGTDFTLTISSLQPEDFATYYCQQHYTTPPTF
GQGTKVEIKRTGGGGSGGGGSGGGGSGGGGSDIQMTQSPSSLEASVGDRVTITCQASQDISNYLNWYQQKPGKSPKLLIYDASNL
ETGVPDRFSGSGSGTDFTFTISSLQAEDEGTYFCQHFDHLPLAFGGGTKLEIKRTGGGGSGGGGSGGGGSGGGGSQVQLQESGPG
DVKPSETLSLTCTVSGGSVSSGDYYWTWIRQSPGKGLEWIGHIYYSGNTNYNPSLKSRLTISIDTSKTTFSLQLSSVTGEDTAIY
YCVRDRVTGAFDIWGQGTTVTVSSASTGGGGSHHHHHH
SEQ ID NO. 98
MPPPRLLFFLLFLTPMEVRPEEPLVVKVEEGDNAVLQCLKGTSDGPTQQLTWSRESPLKPFLKLSLGLPGLGIHMRPLAIWLFIF
NVSQQMGGFYLCQPGPPSEKAWQPGWTVNVEGSGELFRWNVSDLGGLGCGLKNRSSEGPSSPSGKLMSPKLYVWAKDRPEIWEGE
PPCLPPRDSLNQSLSQDLTMAPGSTLWLSCGVPPDSVSRGPLSWTHVHPKGPKSLLSLELKDDRPARDMWVMETGLLLPRATAQD
AGKYYCHRGNLTMSFHLEITARPGGGGSGGGGSGGGGSGGGGSEVQLVESGGGLVQPGGSLRLSCAASGFNIKDTYIHWVRQAPG
KGLEWVARIYPTNGYTRYADSVKGRFTISADTSKNTAYLQMNSLRAEDTAVYYCSRWGGDGFYAMDYWGQGTLVTVSSASTGGGG
SGGGGSGGGGSDIQMTQSPSSLSASVGDRVTITCRASQDVNTAVAWYQQKPGKAPKLLIYSASFLYSGVPSRFSGSRSGTDFTLT
ISSLQPEDFATYYCQQHYTTPPTFGQGTKVEIKRTHHHHHH
SEQ ID NO. 99
MDFQVQIFSFLLISASVIMSRMAQVKLQESGAELVKPGASVKMSCKASGYTFTSYNMHWVKQTPGQGLEWIGAIYPGNGDTSYNQ
KFKGKATLTADKSSSTAYMQLSSLTSEDSADYYCARSNYYGSSYWFFDVWGQGTTVTVSSGGGGSGGGGSGGGGSDIELTQSPTI
LSASPGEKVTMTCRASSSVNYMDWYQKKPGSSPKPWIYATSNLASGVPARFSGSGSGTSYSLTISRVEAEDAATYYCQQWSFNPP
TFGGGTKLEIKRAAAGDPAEPKSPDKTHTCPPCPAPELLGGPSVFLFPPKPKDTLMISRTPECTCVVVDVSHEDPEVKFNWYVDG
VEVHNAKTKPREEQYNSTRYVVSVLTVLHQDWLNGKEYKCKVSNKALPAPIEKTISKAKGQPREPQVYTLPPSREEMTKNQVSLT
CLVKGFYPSDIAVEWESNGQEPNNYKTTPPVLDSDGSFFLYSKLTVDKSRWQQGNVFSCSVMHEALHNHYTQKSLSLSPG
SEQ ID NO. 100
MDFQVQIFSFLLISASVIMSRMAQVKLQESGAELVKPGASVKMSCKASGYTFTSYNMHWVKQTPGQGLEWIGAIYPGNGDTSYNQ
KFKGKATLTADKSSSTAYMQLSSLTSEDSADYYCARSNYYGSSYWFFDVWGQGTTVTVSSGGGGSGGGGSGGGGSDIELTQSPTI
LSASPGEKVTMTCRASSSVNYMDWYQKKPGSSPKPWIYATSNLASGVPARFSGSGSGTSYSLTISRVEAEDAATYYCQQWSFNPP
TFGGGTKLEIKRAAAHHHHHH
SEQ ID NO. 101
MDFQVQIFSFLLISASVIMSRDIELTQSPTILSASPGEKVTMTCRASSSVNYMDWYQKKPGSSPKPWIYATSNALSGVPARFSGS
GSGTSYSLTISRVEAEDAATYYCQQWSFNPPTFGGGTKLEIKRGGGGSGGGGSGGGGSMAQVKLQESGAELVKPGASVKMSCKAS
GYTFTSYNMHWVKQTPGQGLEWIGAIYPGNGDTSYNQKFKGKATLTADKSSSTAYMQLSSLTSEDSADYYCARSNYYGSSYWFFD
VWGQGTTVTVSSAAAGDPAEPKSPDKTHTCPPCPAPELLGGPSVFLFPPKPKDTLMISRTPECTCVVVDVSHEDPEVKFNWYVDG
VEVHNAKTKPREEQYNSTYRVVSVLTVLHQDLWNGKEYKCKVSNKALPAPIEKTISKAKGQPREPQVYTLPPSREEMTKNQVSLT
CLVKGFYPSDAIVEWESNGQPENNYKTTPPVLDSDGSFFLYSKLTVDKSRWQQGNVFSCSVMHEALHNHYTQKSLSLSPG
SEQ ID NO. 102
MDFQVQIFSFLLISASVIMSRDIELTQSPTILSASPGEKVTMTCRASSSVNYMDWYQKKPGSSPKPWIYATSNLASGVPARFSGS
GSGTSYSLTISRCEAEDAATYYCQQWSFNPPTFGGGTKLEIKRGGGGSGGGGSGGGGSMAQVKLQESGAELVKPGASVKMSCKAS
GYTFTSYNMHWVKQTPGQGLEWIGAIYPGNGDTSYNQKFKGKATLTADKSSSTAYMQLSSLTSEDSADYYCARSNYYGSSYWFFD
VWGQGTTVTVSSAAAHHHHHH
SEQ ID NO. 103
MEFGLSWVFLFVALFRGVQCEVQLVESGGGLVQPGGSLRLSCAASGFNIKDTYIHWVRQAPGKGLEWVARIYPTNGYTRYADSVK
GRFTISADTSKNTAYLQMNSLRAEDTAVYYCSRWGGDGFYAMDYWGQGTLVTVSSASTGGGGSGGGGSGGGGSDIQMTQSPSSLS
ASVGDRVTITCRASQDVNTAVAWYQQKPGKAPKLLIYSASFLYSGVPSRFSGSRSGTDFTLTISSLQPEDFATYYCQQHYTTPPT
FGQGTKVEIKRTDKTHTCPPCPAPELLGGPSVFLFPPKPKDTLMISRTPEVTCVVVDVSHEDPEVKFNWYVDGVEVHNAKTKPRE
EQYNSTYRVVSVLTVLHQDWLNGKEYKCKVSNKALPAPIEKTISKAKGQPREPQVYTLPPSREEMTKNQVSLTCLVKGFYPSDIA
VEWESNGQPENNYKTTPPVLDSDGSFFLYSKLTVDKSRWQQGNVFSCSVMHELAHNHYTQKSLSLSPG
SEQ ID NO. 104
MPPPRLLFFLLFLTPMEVRPEEPLVVKVEEGDNAVLQCLKGTSDGPTQQLTWSRESPLKPFLKLSLGLPGLGIHMRPLAIWLFIF
NVSQQMGGVYLCQPGPPSEAKWQPGWTVNVEGSGELFRWNVSDLGGLGCGLKNRSSEGPSSPSGKLMSPKLYVWAKDRPEIWEGE
PPCLPPRDSLNQSLSQDLTMAPGSTLWLSCGVPPDSVSRGPLSWTHVHPKGPKSLLSLELKDDRPARDMWVMETGLLLPRATAQD
AGKYYCHRGNLTMSFHLEITARPGGGGSGGGGSGGGGSGGGGSGGGGSGGGGSGGGGSMAQVKLQESGAELVKPGASVKMSCKAS
GYTFTSYNMHWVKQTPGQGLEWIGAIYPGNGDTSYNQKFKGKATLTIADKSSSTAYMQLSSLTSEDSADYYCARSNYYGSSYWFF
DVWGQGTTVTVSSGGGGSGGGGSGGGGSDIELTQSPTILSASPGEKVTMTCRASSSVNYMDWYQKKPGSSPKPWIYATSNLASGV
PARFSGSGSGTSYSLTISRVEAEDAATYYCQQWSFNPPTFGGGTKLEIKRAAAGDPAEPKSPDKTHTCPPCPAPELLGGPSVFLF
PPKPKDTLMISRTPEVTCVVVDVSHEDPEVKFNWYVDGVEHNAKTKPREEQYNSTYRVVSVLTVLHQDWLNGKEYKCKVSNKALP
IEKTISKAKGQPREPQVYTLPPSREEMTKNQVSLTCLVKGFYPSDIAVEWESNGQPENNYKTTPPVLDSDGSFFLYSKLTVDKSR
WQQGNVFSCSVMHEALHNHYTQKSLSLSPG
SEQ ID NO. 105
MPPPRLLFFLLFLTPMEVRPEEPLVVKVEEGDNAVLQCLKGTSDGPTQQLTWSRESPLKPFLKLSLGLPGLGIHMRPLAIWLFIF
NVSQQMGGFYLCQPGPPSEAKWQPGWTVNVEGSGELFRWNVSDLGGLGCGLKNRSSEGPSSPSGKLMSPKLYVWAKDRPEIWEGE
PPCLPPRDSLNQSLSQDLTMAPGSTLWLSCGVPPDSVSRGPLSWTHVHPKGPKSLLSLELKDDRPARDMWVMETGLLLPRATAQD
AGKYYCHRGNLTMSFHLEITARPGGGGSGGGGSGGGGSGGGGSGGGGSGGGGSGGGGSMAQVKLQESGAELVKPGASVKMSCKAS
GYTFTSYNMHWVKQTPGQGLEWIGAIYPGNGDTSYNQKFKGKATLTADKSSSTAYMQLSSLTSEDSADYYCARSNYYGSSYWFFD
VWGQGTTVTVSSGGGGSGGGGSGGGGSDIELTQSPTILSASPGEKVTMTCRASSSVNYMDWYQQKPGSSPKPWIYATSNLASGVP
ARFSGSGSGTSYSLTISRVEAEDAATYYCQQWSFNPPTFGGGTKLEIKRAAAHHHHHH
SEQ ID NO. 106
MPPPRLLFFLLFLTPMEVRPEEPLVVKVEEGDNAVLQCLKGTSDGPTQQLTWSREDPLKPFLKLSLGLPGLGIHMRPLAIWLFIF
NVSQQMGGFYLCQPGPPSEKAWQPGWTVNVEGSGELFRWNVSDLGGLGCGLKNRSSEGPSSPSGKLMSPKLYVWAKDRPEIWEGE
PPCLPPRDSLNQSLSQDLTMAPGSTLWLSCGVPPDSVSRGPLSWTHVHPKGPKSLLSLELKDDRPARDMWVMETGLLLPRATAQD
AGKYYCHRGNLTMSFHLEITARPDPAEPKSPDKTHTCPPCPAPELLGGPSVFLFPPKPKDTLMISRTPEVCTCVVVDVSHEDPEV
KFNWYVDGVEVHNAKTKPREEQYNSTYRVVSVLTVLHQDWLNGKEYKCKVSNKALPAPIEKTISKAKGQPREPQVYTLPPSREEM
TKNQVSLTCLVKGFYPSDIAVEWESNGQPENNYKTTPPVLDSDGSFFLYSKLTVDKSRWQQGNVFSCSVMHEALHNHYTQKSLSL
SPGGGGGSGGGGSGGGGSGGGGSMAQVKLQESGAELVKPGASVKMSCKASGYTFTSYNMHWVKQTPGQGLEWIGAIYPGNGDTSY
NQKFKGKATLTADKSSSTAYMQLSSLTSEDSADYYCARSNYYGSSYWFFDVWGQGTTVTVSSGGGGSGGGGSGGGGSDIELTQSP
TILSASPGEKVTMTCRASSSVNYMDWYQKKPGSSPKPWIYATSNLASGVPARFSGSGSGTSYSLTISRVEAEDAATYYCQQWSFN
PPTFGGGTKLEIKRA
SEQ ID NO. 107
MDFQVQIFSFLLISASVIMSRMAQVKLQESGAELVKPGASVKMSCKASGYTFTSYNMHWVKQTPGQGLEWIGAIYPGNGDTSYNQ
KFKGKATLTADKSSSTAYMQLSSLTSEDSADYYCARSNYYGSSYWFFDVWGQGTTVTVSSGGGGSGGGSGGGGSDIELTQSPTIL
SASPGEKVTMTCRASSSVNYMDWYQKKPGSSPKPWIYATSNLASGVPARFSGSGSGTSYSLTISRVEAEDAATYYCQQWSFNPPT
FGGGTKLEIKRAAAGGGGSGGGGSGGGGSGGGGSPEEPLVVKVEEGDNAVLQCLKGTSDGPTQQLTWSRESPLKPFLKLSLGLPG
LGIHMRPLAIWLFIFNVSQQMGGFYLCQPGPPSEKAWQPGWTVNVEGSGELFRWNVSDLGGLGCGLKNRSSEGPSSPSGKLMSPK
LYVWAKDRPEIWEGEPPCLPPRDSLNQSLSQDLTMAPGSTLWLSCGVPPDSVSRGPLSWTHVHPGKGPKSLLSLELKDDRPARDM
WVMETGLLLPRATAQDAGKYYCHRGNLTMSFHLEITARPDPAEPKSPDKTHTCPPCPAPELLGGPSVFLFPPKPDKTLMISRTPE
VTCVVVDSHEDPEVKFNWYVDGVEVHNAKTKPREEQYNSTRYVVSVLTVLHQDWLNGKEYKCKVSNAKLPAPIEKTISKAKGQPR
EPQVYTLPPSREEMTKNQVSLTCLVKGFYPSDIAVEWESNGQPENNYKTTPPVLDSDGSFFLYSKLTVDKSRWQQGNVFSCSVMH
EALHNHYTQKSLSLSPG
SEQ ID NO. 108
MLRLLLALNLFPSIQVTGDIQMTQTTSSLSASLGDRVITSCRASQDISKYLNWYQQKPDGTVKLLIYHTSRLHSGVPSRFSGSGS
GTDYSLTISNLEQEDIATYFCQQGNTLPYTFGGGTKLEITGGGGSGGGGSGGGGSGGGGSEVKLQESGPGLVAPSQSLSVTCTVS
GVSLPDYGVSWIRQPPRKGLEWLGVIWGSETTYYNSALKSRLTIIKDNSKSQVFLKMNSLQTDDTAIYYCAKHYYYGGSYAMDYW
GQGTSVTVSSDYKDDDDKIEVMYPPPYLDNEKSNGTIIHVKGKHLCPSPLFPGPSKPFWVLVVVGGVLACYSLLVTVAFIIFWVR
SKRSRLLHSDYMNMTPRRPGPTRKHYQPYAPPRDFAAYRSKRGRKKLLYIFKQPFMRPVQTTQEEDGCSCRFPEEEEGGCELRVK
FSRSADAPAYQQGQNQLYNELNLGRREEYDVLDKRRGRDPEMGGKPQRRKNPQEGLYNELQKDKMAEAYSEIGMKGERRRGKGHD
GLYQGLSTATKDTYDALHMQALPPREGRGSLLTCGDVEENPGPMPPPRLLFFLLFLTPMEVRPEEPLVVKVEEGDNAVLQCLKGT
SDGPTQQLTWSRESPLKPFLKLSLGLPGLGIHMRPLAIWLFIFNVSQQMGGFYLCQPGPPSEKAWQPGWTVNVEGSGELFRWNVS
DLGGLGCGLKNRSSEGPSSPSGKLMSPKLYVWAKDRPEIWEGECPPCLPPRDSLNQSLSQDLTMAPGSTLWLWCGVPPDSVSRGP
LSWTHVHPKGPKSLLSLELKDDRPARDMWVMETGLLLPRATAQDAGKYYCHRGNLTMSFHLEITARPGGGGSGGGGSGGGGSGGG
GSEVQLVESGGGLVQPGGSLRLSCAASGFNIKDTYIHWVRQAPGKGLEWVARIYPTNGYTRYADSVKGRFTISADTSKNTAYLQM
NSLRAEDTAVYYCSRWGGDGFYAMDYWGQGTLVTVSSASTGGGGSGGGGSGGGGSDIQMTQSPSSLSASVGDRVTITCRASQDVN
TAVAWYQQKPGKAPKLLIYSASFLYSGVPSRFSGSRSGTDFTLTISSLQPEDFATYYCQQHYTTPPTFGQGTKVEIKRTSRHHHH
HH
SEQ ID NO. 109
MPPPRLLFFLLFLTPMEVRPEEPLVVKVEEGDNAVLQCLKGTSDGPTQQLTWSRESPLKPFLKLSLGLPGLGIHMRPLAIWLFIF
NVSQQMGGFYLCQPGPPSEKAWQPGWTVNVEGSGELFRWNVSDLGGLGCGLKNRSSEGPSSPSGKLMSPKLYVWAKDRPEIWEGE
PPCLPPRDSLNQSLSQDLTMAPGSTLWLSCGVPPDSVSRGPLSWTHVHPKGPKSLLSLELKDDRPARDMWVMETGLLLPRATAQD
AGKYYCHRGNLTMSFHLEITARPGGGGSGGGGSGGGGSGGGGSEVQLVESGGGLVQPGGSLRLSCAASGFNIKDTYIHWVRQAPG
KGLEWVARIYPTNGYTRYADSVKGRFTISADTSKNTAYLQMNSLRAEDTAVYYCSRWGGDGFYAMDYWGQGTLVTVSSASTGGGG
SGGGGSGGGGSDIQMTQSPSSLSASVGDRVTITCRASQDVNTAVAWYQQKPGKAPKLLIYSASFLYSGVPSRFSGSRSGTDFTLT
ISSLQPEDFATYYCQQHYTTPPTFGQGTKVEIKRTSRHHHHHHEGRGSLLTCGDVEENPGPMLRLLLALNLFPSIQVTGDIQMTQ
TTSSLSASLGDRVTISCRASQDISKYLNWYQQKPDGTVKLLIHYTSRLHSGVPSRFSGSGSGTDYSLTISNLEQEDIATYFCQQG
NTLPYTFGGGTKLEITGGGGSGGGGSGGGGSGGGGSEVKLQESGPGLVAPSQSLSVTCTVSGVSLPDYGVSWIRQPPRKGLEWLG
VIWGSETTYYNSALKSRLTIIKDNSKSQVFLKMNSLQTDDTAIYYCAKHYYYGGSYAMDYWGQGTSVTVSSDYKDDDDKIEVMYP
PPYLDNEKSNGTIIHVKGKHLCPSPLFPGPSKPFWVLVVVGGVLACYSLLVTVAFIIFWVRSKRSRLLHSDYMNMTPRRPGPTRK
HYQPYAPPRDFAAYRSKRGRKKLLYIFKQPFMRPVQTTQEEDGCSCRFPEEEEGGCELRVKFSRSADAPAYQQGQNQLYNELNLG
RREEYDVLDKRRGRDPEMGGKPQRRKNPQEGLYNELQKDKMAEAYSEIGMKGERRRGKGHDGLYQGLSTATKDTYDALHMQALPP
R
SEQ ID NO. 110
MPPPRLLFFLLFLTPMEVRPEEPLVVKVEEGDNAVLQCLKGTSDGPTQQLTWSRESPLKPFLKLSLGLPGLGIHMRPLAIWLFIF
NVSQQMGGFYLCQPGPPSEKAWQPGWTVNVEGSGELFRWNVSDLGGLGCGLKNRSSEGPSSPSGKLMSPKLYVWAKDRPEIWEGE
PPCLPPRDSLNQSLSQDLTMAPGSTLWLSCGVPPDSVSRGPLSWTHVHPKGPKSLLSLELKDDRPARDMWVMETGLLLPRATAQD
AGKYYCHRGNLTMSFHLEITARPGGGGSGGGGSGGGGSGGGGSEVQLVESGGGLVQPGGSLRLSCAASGFNIKDTYIHWVRQAPG
KGLEWVARIYPTNGYTRYADSVKGRFTISADTSKNTAYLQMNSLRAEDTAVYYCSRWGGDGFYAMDYWGQGTLVTVSSASTGGGG
SGGGGSGGGGSDIQMTQSPSSLSASVGDRVTITCRASQDVNTAVAWYQQKPGKAPKLLIYSASFLYSGVPSRFSGSRSGTDFTLT
ISSLQPEDFATYYCQQHYTTPPTFGQGTKVEIKRTHHHHHH
SEQ ID NO. 111
MPPPRLLFFLLFLTPMEVRPEEPLVVKVEEGDNAVLQCLKGTSDGPTQQLTWSRESPLKPFLKLSLGLPGLGIHMRPLAIWLFIF
NVSQQMGGFYLCQPGPPSEKAWQPGWTVNVEGSGELFRWNVSDLGGLGCGLKNRSSEGPSSPSGKLMSPKLYVWAKDRPEIWEGE
PPCLPPRDSLNQSLSQDLTMAPGSTLWLSCGVPPDSVSRGPLSWTHVHPKGPKSLLSLELKDDRPARDMWVMETGLLLPRATAQD
AGKYYCHRGNLTMSFHLEITARPGGGGSGGGGSGGGGSGGGGSEVQLVESGGGLVQPGGSLRLSCAASGFNIKDTYIHWVRQAPG
KLGEWVARIYPTNGYTRYADSVKGRFTISADTSKNTAYLQMNSLRAEDTAVYYCSRWGGDGFYAMDYWGQGTLVTVSSASTGGGG
SGGGGSGGGGSDIQMTQSPSSLSASVGDRVTITCRASQDVNTAVAWYQQKPGKAPKLLIYSASFLYSGVPSRFSGSRSGTDFTLT
ISSLQPEDFATYYCQQHYTTPPTFGQGTKVEIKRTHHHHHH
SEQ ID NO. 12
MPPPRLLFFLLFLTPMEVRPEEPLVVKVEEGDNAVLQCLKGTSDGPTQQLTWSRESPLKPFLKLSLGLPGLGIHMRPLAIWLFIF
NVSQQMGGFYLCQPGPPSEKAWQPGWTVNVEGSGELFRWNVSDLGGLGCGLKNRSSEGPSSPSGKLMSPKLYVWAKDRPEIWEGE
PPCLPPRDSLNQSLSQDLTMAPGSTLWLSCGVPPDSVSRGPLSWTHVHPKGPKSLLSLELKDDRPARDMWVMETGLLLPRATAQD
AGKYYCHRGNLTMSFHLEITARPVLWHWLLRTGGWK
SEQ ID NO. 113
MPPPRLLFFLLFLTPMEVRPEEPLVVKVEEGDNAVLQCLKGTSDGPTQQLTWSRESPLKPFLKLSLGLPGLGIHMRPLAIWLFIF
NVSQQMGGFYLCQPGPPSEKAWQPGWTVNVEGSGELFRWNVSDLGGLGCGLKNRSSEGPSSPSGKLMSPKLYVWAKDRPEIWEGE
PPCLPPRDSLNQSLSQDLTMAPGSTLWLSCGVPPDSVSRGPLSWTHVHPKGPKSLLSLELKDDRPARDMW
VMETGLLLPRATAQDAGKYYCHRGNLTMSFHLEITARPGGGGSGGGGSGGGGSGGGGSEVQLVESGGGLVQPGGSLRLSCAASGF
NIKDTYIHWVRQAPGKGLEWVARIYPTNGYTRYADSVKGRFTISADTSKNTAYLQMNSLRAEDTAVYYCSRWGGDGFYAMDYWGQ
GTLVTVSSASTGGGGSGGGGSGGGGSDIQMTQSPSSLSASVGDRVTITCRASQDVNTAVAWYQQKPGKAPKLLIYSASFLYSGVP
SRFSGSRSGTDFTLTISSLQPEDFATYYCQQHYTTPPTFGQGTKVEIKRTSRHHHHHH
SEQ ID NO. 114
MPPPRLLFFLLFLTPMEVRPEEPLVVKVEEGDNAVLQCLKGTSDGPTQQLTWSRESPLKPFLKLSLGLPGLGIHMRPLAIWLFIF
NVSQQMGGFYLCQPGPPSEKAWQPGWTVNVEGSGELFRWNVSDLGGLGCGLKNRSSEGPSSPSGKLMSPKLYVWAKDRPEIWEGE
PPCLPPRDSLNQSLSQDLTMAPGSTLWLSCGVPPDSVSRGPLSWTHVHPKGPKSLLSLELKDDRPARDMWVMETGLLLPRATAQD
AGKYYCHRGNLTMSFHLEITARPGGGGSGGGGSGGGGSGGGGSQVQLVQSGAEDKKPGESVKISCKASGYTFTNYGMNWVRQAPG
QGLKWMGWINTYTGESTYADDFKGRFAFSLDTSASTAYLQLSSLRGEDTAVYFCARFAIKGDYWGQGTTVTVSSASTGGGGSGGG
GSGGGGSGGGGSDIVMTQSPLSLEVSPGEPASISCRSTKSLLHSDGITYLYWYLQKPGQSPQLLIYQLSNLASGVPDRFSSSGSG
TDFTLKISRVEAEDEGTYYCQANLEIPRTFGQGTKLEIKRTHHHHHH
SEQ ID NO. 115
MPPPRLLFFLLFLTPMEVRPEEPLVVKVEEGDNAVLQCLKGTSDGPTQQLTWSRESPLKPFLKLSLGLPGLGIHMRPLAIWLFIF
NVSQQMGGFYLCQPGPPSEKAWQPGWTVNVEGSGELFRWNVSDLGGLGCGLKNRSSEGPSSPSGKLMSPKLYVWAKDRPEIWEGE
PPCLPPRDSLNQSLSQDLTMAPGSTLWLSCGVPPDSVSRGPLSWTHVHPKGPKSLLSLELKDDRPARDMWVMETGLLLPRATAQD
AGKYYCHRGNLTMSFHLEITARPGGGGSGGGGSGGGGSGGGGSQVQLVQSGAEVKPDASVKLSCKASGYTFTDYYMHWVRQAPGQ
GLEWMGRVNPNRRGTTYNQKFEGRVTMTTDTSTSTAYMQLSSLRGEDTAVYYCARANWLDYWGQGTTVTVSSASTGGGGSGGGGS
GGGGSGGGGSDIQMTQSPSSLEASVGDRVTITCSVSSSVSSIYLHWYQQKPGKSPKLLKIYSTSNLASGVPSRFSGSGSGTDFTL
TISSLQAEDEGTYYCQVYSGYPLTFGGGTKLEIKRTHHHHHH
SEQ ID NO. 116
MPPPRLLFFLLFLTPMEVRPEEPLVVKVEEGDNAVLQCLKGTSDGPTQQLTWSRESPLKPFLKLSLGLPGLGIHMRPLAIWLFIF
NVSQQMGGFYLCQPGPPSEKAWQPGWTVNVEGSGELFRWNVSDLGGLGCGLKNRSSEGPSSPSGKLMSPKLYVWAKDRPEIWEGE
PPCLPPRDSLNQSLSQDLTMAPGSTLWLSCGVPPDSVSRGPLSWTHVHPKGPKSLLSLELKDDRPARDMWVMETGLLLPRATAQD
AGKYYCHRGNLTMSFHLEITARPGGGGSGGGGSGGGGSGGGGSQVQLQESGPGDVKPSETLSLTCTVSGGSVSSGDYYWTWIRQS
PGKGLEWIGHIYYSGNTNYNPSLKSRLTISIDTSKTTFSLQLSSVTGEDTAIYYCVDRVTGAFDIWGQGTTVTVSSASTGGGGSG
GGGSGGGGSGGGGSDIQMTQSPSSLEASVGDRVTITCQASQDISNYLNWYQQKPGKSPKLLIYDASNLETGVPDRFSGSGSGTDF
TFTISSLQAEDEGTYFCQHFDHLPLAFGGGTKLEIKRTHHHHHH
SEQ ID NO. 117
MLRLLLALNLFPSIQVTGDIQMTQTTSSLSASLGDRVTISVRASQDISKYLNWYQQKPDGTVKLLIYHTSRLHSGVPSRFSGSGS
GTDYSLTISNLEQEDIATYFCQQGNTLPYTFGGGTKLEITGGGGSGGGGSGGGGSGGGGSEVKLQESGPGLVAPSQSLSVTCTVS
GVSLPDYGVSWIRQPPRKGLEWLGVIWGSETTYYNSALKSRLTIIKDNSKSQVFLKMNSLQTDDTAIYYCAKHYYYGGSYAMDYW
GQGTSVTVSSDYKDDDDKIEVMYPPPYLDNEKSNGTIIHVKGKHLCPSPLFGPSKPFWVLVVVGGVLACYSLLVTVAFIIFWVRS
KRSRLLHSDYMNMTPRRPGPTRKHYQPYAPPRDFAAYRSKRGRKKLLYIFKQPFMRPVQTTQEEDGCSCRFPEEEEGGCELRVKF
SRSADAPAYQQGQNQLYNELNLGRREEYDVLDKRRGRDPEMGGKPQRRKNPQEGLYNELQKDKMAEAYSEIGMKGERRRGKGHDG
LYQGLSTATKDTYDALHMQALPPR
SEQ ID NO. 118
MLRLLLALNLFPSIQVTGDIQMTQTTSSLSASLGDRVTISCRASQDISKYLNWYQQKPDGTVKLLIYHTSRLHSGVPSRFSGSGS
GTDYSLTISNLEQEDIATYFCQQGNTLPYTFGGGTKELITGGGGSGGGGSGGGGSGGGGSEVKLQESGPGLVAPSQSLSVTCTVS
GVSLPDYGVSWIRQPPRKGLEWLGVIWGSETTYYNSALKSRLTIIKDNSKSQVFLKMNSLQTDDTAIYYCAKHYYYGGSYAMDYW
GQGTSVTVSSIEVMYPPPYLDNEKSNGTIIHVKGKHLCPSPLFPGPSKPFWVLVVVGGVLACYSLLVTVAFIIFWVRSKRSRLLH
SDYMNMTPRRPGPTRKHYQPYAPPRDFAAYRSKRGRKKLLYIFKQPFMRPVQTTQEEDGCSCRFPEEEGGCELRVKFSRSADAPA
YQQGQNQLYNELNGRREEYDVLDKRRGRDPEMGGKPQRRKNPQEGLYNELQKDKMAEAYSEIGMKGERRRGKGHDGLYQGLSTAT
KDTYDALHMQALPPR
SEQ ID NO. 119
MEKDTLLLWVLLLWVLPGSTGEVLKLVESGGGLVQPGGSLKLSCAASGFDFSRYWMSWVQAPGKGLEWIGEINLDSSTINYTPSL
KDKFIISRDNAKNTLYLQMNSKVRSEDTALYYCARRYDAMDYWGQGTSVTVSSAKTTAPSVYPLALVCGDTTGSSVTLGCLVKGY
FPEPVTLTWNSGSLSSGVHTFPAVLQSDLYTLSSSVTVTSSTWPSQSITCNVAHPASSTKVDKKIEPRGPTIKPCPPCKCPAPNL
LGGPSVFIFPPKIKDVLMISLSPIVTCVVVDVSEDDPDVQISWFVNNVEVHTQATQTHREDYNSTLORVVSALPIQHQDWMSGKE
FKCKVNNKDLPAPIERTISKPGKSVRAPQVYVLPPPEEEMTKKQVTLTCMVDTDFMPEDIYVEWTNNGKTELNYKNTEPVLDSDG
SYFMYSKLRVEKKNWVERNSYSCSVVHEGLHNHHTTKSFSRTPGK
SEQ ID NO. 120
MDFGLIFFIVALLKGVQCDIVLTQSPASLAVSLGQRATISCRASESVDDYGISFMNWFQQKPGQPPKLLIYAAPONQGSGVPARF
SGSGSGTDFSLNIHPMEEDDTAMYFCQQSKDVRWTFGGGTKLEIKRADAAPTVSIFPPSSEQLTSGGASVVCFLNNFYPKDINVK
WKIDGSERQGNVLNSWTDQDSKDSTYSMSSTLTLTKDEYERHNSYTCEATHKTSTSPIVKSFNRNEC
SEQ ID NO. 121
MEKDTLLLWVLLLWVPGSTGEVKLVESGGGLVQPGGSLKLSCAASGFDFSRYWMSWVRQAGKGLEWIGEINLDSSTINYTPSLKD
KFIISRDNAKNTLYLQMSKVRSEDTALYYCARRYDAMDYWGQGTSVTVSSASTGGGGSGGGGSGGGGSGGGGSDIVLTQSPASLA
VSQGQRATISCRAESEVDDYGISFMNWFQQKPGQPPKLLIYAAPNQGSGVPARFSGSGSGTDFSLNIHPMEEDDTATYFCQQSKD
VRWTFGGGTKLEIKRGGGGSGGGGSGGGGSGGGGSEVQLVESGGGLVQPGGSLRLSCAASGFNIKDTYIHWVRQAPGKGLEWVAR
IYPTNGYTRYADSVKGRFTISADTSKNTAYLQMNSLRAEDTAVYYCSRWGGDGFYAMDYWGQGTLVTVSSASTGGGGSGGGGSGG
GGSDIQMTQSPSSLSASVGDRVTITCRASQDVNTAVAWYQQKPGKAPKLLIYSASFLYSGVPSRFSGSRSGTDFTLTISSLQPED
FATYYCQQHYTTPPTFGQGTKVEIKRTSRGPHHHHHH
SEQ ID NO. 122
MFGFLIFFIVALLKGVQCDIVLTQSPASLAVSQGQRATISCRASESVDDYGISFMNWFQQKPGQPPKLLIYAAPNQGSGVPARFS
GSGSGTDFSLNIHPMEEDDTATYFCQQSKDVRWTHGGGTKLEIKRGGGGSGGGGSGGGGSGGGGSEVKLVESGGGLVQPGGSLKL
SCAASGFDFSRYWMSWVRQAPGKGLEWIGEINLDSSTINYTPSLKDKFIISRDNAKNTLYLQMSKVRSEDTALYYCARRYDAMDY
WGQGTSVTVSSGGGGSGGGGSGGGGSGGGGSEVQLVESGGGLVQPGGSLRLSCAASGFNIKDTYIHWVRQAPGKGLEWVARIYPT
NGYTRYADSVKGRFTISADTSKNTAYLQMNSLRAEDTAVYYCSRWGGDGFYAMDYWGQGTLVTVSSASTGGGGSGGGGSGGGGSD
IQMTQSPSSLSASVGDRVTITCRASQDVNTAVAWYQQKPGKAPKLLIYSASFLYSGVPSRFSGSRSGTDFTLTISSLQPEDFATY
YCQQHYTTPPTFGQGTKVEIKRTSRGPHHHHHH

### Listing of Nucleotide Sequences

SEQID NO. 201
ATGGAGTTTGGGCTGAGCTGGGTTTTCCTCGTTGCTCTTTTTAGAGGTGTCCAGTGTCAGGTGCAGCTGCAGGAGTCG
GGCCCAGGACTGGTGAAGCCTTCGGAGACCCTGTCCCTCACCTGCACTGTCTCTGGTGGCTCCGTCAGCAGTGGTGAT
TACTACTGGACCTGGATCCGGCAGTCCCCAGGGAAGGGACTGGAGTGGATTGGACACATCTATTACAGTGGGAACACC
AATTATAACCCCTCCCTCAAGAGTCGACTCACCATATCAATTGACACGTCCAAGACTCAGTTCTCCCTGAAGCTGAGT
TCTGTGACCGCTGCGGACACGGCCATTTATTACTGTGTGCGAGATCGAGTGACTGGTGCTTTTGATATCTGGGGCCAA
GGGACAATGGTCACCGTCTCTTCAGCCTCCACCAAGGGCCCATCGGTCTTCCCCCTGGCGCCCTGCTCCAGGAGCACC
TCCGAGAGCACAGCGGCCCTGGGCTGCCTGGTCAAGGACTACTTCCCTGAACCGGTGACGGTGTCGTGGAACTCAGGC
GCTCTGACCAGCGGCGTGCACACCTTCCCGGCTGTCCTACAGTCCTCAGGACTCTACTCCCTCAGCAGCGTGGTGACC
GTGCCCTCCAGCAACTTCGGCACCCAGACCTACACCTGCAACGTAGATCACAAGCCCAGCAATACCAAGGTGGACAAG
ACAGTTGAGCGCAAATGTTGTGTCGAGTGCCCACCGTGCCCAGCACCACCTGTGGCAGGACCGTCAGTCTTCCTCTTC
CCCCCAAAACCCAAGGACACCCTCATGATCTCCCGGACCCCTGAGGTCACGTGCGTGGTGGTGGACGTGAGCCACGAA
GACCCCGAGGTCCAGTTCAACTGGTACGTGGACGGCGTGGAGGTGCATAATGCCAAGACAAAGCCACGGGAGGAGCAG
TTCCAAAGCACGTTCCGTGTGGTCAGCGTCCTCACCGTCGTGCACCAGGACTGGCTGAACGGCAAGGAGTACAAGTGC
AAGGTCTCCAACAAAGGCCTCCCAGCCCCCATCGAGAAAACCATCTCCAAAACCAAAGGGCAGCCCCGAGAACCACAG
GTGTACACCCTGCCCCCATCCCGGGAGGAGATGACCAAGAACCAGGTCAGCCTGACCTGCCTGGTCAAAGGCTTCTAC
CCCAGCGACATCGCCGTGGAGTGGGAGAGCAATGGGCAGCCGGAGAACAACTACAAGACCACGCCTCCCATGCTGGAC
TCCGACGGCTCCTTCTTCCTCTACAGCAAGCTCACCGTGGACAAGAGCAGGTGGCAGCAGGGGAACGTCTTCTCATGC
TCCGTGATGCATGAGGCTCTGCACAACCACTACACGCAGAAGAGCCTCTCCCTGTCTCCGGGT
SEQID NO. 202
ATGCCACCTCCTCGCCTCCTCTTCTTCCTCCTCTTCCTCACCCCCATGGAAGTCAGGCCCGAGGAACCTCTAGTGGTG
AAGGTGGAAGAGGGAGATAACGCTGTGCTGCAGTGCCTCAAGGGGACCTCAGATGGCCCCACTCAGCAGCTGACCTGG
TCTCGGGAGTCCCCGCTTAAACCCTTCTTAAAACTCAGCCTGGGGCTGCCAGGCCTGGGAATCCACATGAGGCCCCTG
GCCATCTGGCTTTTCATCTTCAACGTCTCTCAACAGATGGGGGGCTTCTACCTGTGCCAGCCGGGGCCCCCCTCTGAG
AAGGCCTGGCAGCCTGGCTGGACAGTCAATGTGGAGGGCAGCGGGGGAGGTGGGTCTGGAGGTGGAGGATCTGGTGGA
GGTGGGTCTGACATCCAGATGACCCAGTCTCCATCCTCCCTGTCTGCATCTGTAGGAGACAGAGTCACCATCACTTGC
CAGGCGAGTCAGGACATCAGCAACTATTTAAATTGGTATCAGCAGAAACCAGGGAAAGCCCCTAAACTCCTGATCTAC
GATGCATCCAATTTGGAAACAGGGGTCCCATCAAGGTTCAGTGGAAGTGGATCTGGGACAGATTTTACTTTCACCATC
AGCAGCCTGCAGCCTGAAGATATTGCAACATATTTCTGTCAACACTTTGATCATCTCCCGCTCGCTTTCGGCGGAGGG
ACCAAGGTGGAGATCAAACGAACTGTGGCTGCACCATCTGTCTTCATCTTCCCGCCATCTGATGAGCAGTTGAAATCT
GGAACTGCCTCTGTTGTGTGCCTGCTGAATAACTTCTATCCCAGAGAGGCCAAAGTACAGTGGAAGGTGGATAACGCC
CTCCAATCGGGTAACTCCCAGGAGAGTGTCACAGAGCAGGACAGCAAGGACAGCACCTACAGCCTCAGCAGCACCCTG
ACGCTGAGCAAAGCAGACTACGAGAAACACAAAGTCTACGCCTGCGAAGTCACCCATCAGGGCCTGAGCTCGCCCGTC
ACAAAGAGCTTCAACAGGGGAGAGTGT
SEQID NO. 203
ATGCCACCTCCTCGCCTCCTCTTCTTCCTCCTCTTCCTCACCCCCATGGAAGTCAGGCCCGAGGAACCTCTAGTGGTG
AAGGTGGAAGAGGGAGATAACGCTGTGCTGCAGTGCCTCAAGGGGACCTCAGATGGCCCCACTCAGCAGCTGACCTGG
TCTCGGGAGTCCCCGCTTAAACCCTTCTTAAAACTCAGCCTGGGGCTGCCAGGCCTGGGAATCCACATGAGGCCCCTG
GCCATCTGGCTTTTCATCTTCAACGTCTCTCAACAGATGGGGGGCTTCTACCTGTGCCAGCCGGGGCCCCCCTCTGAG
AAGGCCTGGCAGCCTGGCTGGACAGTCAATGTGGAGGGCAGCGGGGGAGGTGGGTCTGGAGGTGGAGGATCTGGTGGA
GGTGGGTCTCAGGTGCAGCTGCAGGAGTCGGGCCCAGGACTGGTGAAGCCTTCGGAGACCCTGTCCCTCACCTGCACT
GTCTCTGGTGGCTCCGTCAGCAGTGGTGATTACTACTGGACCTGGATCCGGCAGTCCCCAGGGAAGGGACTGGAGTGG
ATTGGACACATCTATTACAGTGGGAACACCAATTATAACCCCTCCCTCAAGAGTCGACTCACCATATCAATTGACACG
TCCAAGACTCAGTTCTCCCTGAAGCTGAGTTCTGTGACCGCTGCGGACACGGCCATTTATTACTGTGTGCGAGATCGA
GTGACTGGTGCTTTTGATATCTGGGGCCAAGGGACAATGGTCACCGTCTCTTCAGCCTCCACCAAGGGCCCATCGGTC
TTCCCCCTGGCGCCCTGCTCCAGGAGCACCTCCGAGAGCACAGCGGCCCTGGGCTGCCTGGTCAAGGACTACTTCCCT
GAACCGGTGACGGTGTCGTGGAACTCAGGCGCTCTGACCAGCGGCGTGCACACCTTCCCGGCTGTCCTACAGTCCTCA
GGACTCTACTCCCTCAGCAGCGTGGTGACCGTGCCCTCCAGCAACTTCGGCACCCAGACCTACACCTGCAACGTAGAT
CACAAGCCCAGCAATACCAAGGTGGACAAGACAGTTGAGCGCAAATGTTGTGTCGAGTGCCCACCGTGCCCAGCACCA
CCTGTGGCAGGACCGTCAGTCTTCCTCTTCCCCCCAAAACCCAAGGACACCCTCATGATCTCCCGGACCCCTGAGGTC
ACGTGCGTGGTGGTGGACGTGAGCCACGAAGACCCCGAGGTCCAGTTCAACTGGTACGTGGACGGCGTGGAGGTGCAT
AATGCCAAGACAAAGCCACGGGAGGAGCAGTTCCAAAGCACGTTCCGTGTGGTCAGCGTCCTCACCGTCGTGCACCAG
GACTGGCTGAACGGCAAGGAGTACAAGTGCAAGGTCTCCAACAAAGGCCTCCCAGCCCCCATCGAGAAAACCATCTCC
AAAACCAAAGGGCAGCCCCGAGAACCACAGGTGTACACCCTGCCCCCATCCCGGGAGGAGATGACCAAGAACCAGGTC
AGCCTGACCTGCCTGGTCAAAGGCTTCTACCCCAGCGACATCGCCGTGGAGTGGGAGAGCAATGGGCAGCCGGAGAAC
AACTACAAGACCACGCCTCCCATGCTGGACTCCGACGGCTCCTTCTTCCTCTACAGCAAGCTCACCGTGGACAAGAGC
AGGTGGCAGCAGGGGAACGTCTTCTCATGCTCCGTGATGCATGAGGCTCTGCACAACCACTACACGCAGAAGAGCCTC
TCCCTGTCTCCGGGT
SEQID NO. 204
ATGGAGACAGACACACTCCTGCTATGGGTACTGCTGCTCTGGGTTCCAGGTTCCACTGGTGACATCCAGATGACCCAG
TCTCCATCCTCCCTGTCTGCATCTGTAGGAGACAGAGTCACCATCACTTGCCAGGCGAGTCAGGACATCAGCAACTAT
TTAAATTGGTATCAGCAGAAACCAGGGAAAGCCCCTAAACTCCTGATCTACGATGCATCCAATTTGGAAACAGGGGTC
CCATCAAGGTTCAGTGGAAGTGGATCTGGGACAGATTTTACTTTCACCATCAGCAGCCTGCAGCCTGAAGATATTGCA
ACATATTTCTGTCAACACTTTGATCATCTCCCGCTCGCTTTCGGCGGAGGGACCAAGGTGGAGATCAAACGAACTGTG
GCTGCACCATCTGTCTTCATCTTCCCGCCATCTGATGAGCAGTTGAAATCTGGAACTGCCTCTGTTGTGTGCCTGCTG
AATAACTTCTATCCCAGAGAGGCCAAAGTACAGTGGAAGGTGGATAACGCCCTCCAATCGGGTAACTCCCAGGAGAGT
GTCACAGAGCAGGACAGCAAGGACAGCACCTACAGCCTCAGCAGCACCCTGACGCTGAGCAAAGCAGACTACGAGAAA
CACAAAGTCTACGCCTGCGAAGTCACCCATCAGGGCCTGAGCTCGCCCGTCACAAAGAGCTTCAACAGGGGAGAGTGT
SEQID NO. 205
ATGGAGACAGACACACTCCTGCTATGGGTACTGCTGCTCTGGGTTCCAGGTTCCACTGGTGACATCCAGATGACCCAG
TCTCCATCCTCCCTGTCTGCATCTGTAGGAGACAGAGTCACCATCACTTGCCAGGCGAGTCAGGACATCAGCAACTAT
TTAAATTGGTATCAGCAGAAACCAGGGAAAGCCCCTAAACTCCTGATCTACGATGCATCCAATTTGGAAACAGGGGTC
CCATCAAGGTTCAGTGGAAGTGGATCTGGGACAGATTTTACTTTCACCATCAGCAGCCTGCAGCCTGAAGATATTGCA
ACATATTTCTGTCAACACTTTGATCATCTCCCGCTCGCTTTCGGCGGAGGGACCAAGGTGGAGATCAAACGAACTGTG
GCTGCACCATCTGTCTTCATCTTCCCGCCATCTGATGAGCAGTTGAAATCTGGAACTGCCTCTGTTGTGTGCCTGCTG
AATAACTTCTATCCCAGAGAGGCCAAAGTACAGTGGAAGGTGGATAACGCCCTCCAATCGGGTAACTCCCAGGAGAGT
GTCACAGAGCAGGACAGCAAGGACAGCACCTACAGCCTCAGCAGCACCCTGACGCTGAGCAAAGCAGACTACGAGAAA
CACAAAGTCTACGCCTGCGAAGTCACCCATCAGGGCCTGAGCTCGCCCGTCACAAAGAGCTTCAACAGGGGAGAGTGT
GACAAAACTCACACATCGCCACCGTCCCCAGCACCTGAAGCCGCGGGGGGACCGTCAGAAGTCAGGCCCGAGGAACCT
CTAGTGGTGAAGGTGGAAGAGGGAGATAACGCTGTGCTGCAGTGCCTCAAGGGGACCTCAGATGGCCCCACTCAGCAG
CTGACCTGGTCTCGGGAGTCCCCGCTTAAACCCTTCTTAAAACTCAGCCTGGGGCTGCCAGGCCTGGGAATCCACATG
AGGCCCCTGGCCATCTGGCTTTTCATCTTCAACGTCTCTCAACAGATGGGGGGCTTCTACCTGTGCCAGCCGGGGCCC
CCCTCTGAGAAGGCCTGGCAGCCTGGCTGGACAGTCAATGTGGAGGGCAGCGGG
SEQID NO. 206
ATGGAGTTTGGGCTGAGCTGGGTTTTCCTCGTTGCTCTTTTTAGAGGTGTCCAGTGTCAGGTGCAGCTGCAGGAGTCG
GGCCCAGGACTGGTGAAGCCTTCGGAGACCCTGTCCCTCACCTGCACTGTCTCTGGTGGCTCCGTCAGCAGTGGTGAT
TACTACTGGACCTGGATCCGGCAGTCCCCAGGGAAGGGACTGGAGTGGATTGGACACATCTATTACAGTGGGAACACC
AATTATAACCCCTCCCTCAAGAGTCGACTCACCATATCAATTGACACGTCCAAGACTCAGTTCTCCCTGAAGCTGAGT
TCTGTGACCGCTGCGGACACGGCCATTTATTACTGTGTGCGAGATCGAGTGACTGGTGCTTTTGATATCTGGGGCCAA
GGGACAATGGTCACCGTCTCTTCAGCCTCCACCAAGGGCCCATCGGTCTTCCCCCTGGCGCCCTGCTCCAGGAGCACC
TCCGAGAGCACAGCGGCCCTGGGCTGCCTGGTCAAGGACTACTTCCCTGAACCGGTGACGGTGTCGTGGAACTCAGGC
GCTCTGACCAGCGGCGTGCACACCTTCCCGGCTGTCCTACAGTCCTCAGGACTCTACTCCCTCAGCAGCGTGGTGACC
GTGCCCTCCAGCAACTTCGGCACCCAGACCTACACCTGCAACGTAGATCACAAGCCCAGCAATACCAAGGTGGACAAG
ACAGTTGAGCGCAAATGTTGTGTCGAGTGCCCACCGTGCCCAGCACCACCTGTGGCAGGACCGTCAGTCTTCCTCTTC
CCCCCAAAACCCAAGGACACCCTCATGATCTCCCGGACCCCTGAGGTCACGTGCGTGGTGGTGGACGTGAGCCACGAA
GACCCCGAGGTCCAGTTCAACTGGTACGTGGACGGCGTGGAGGTGCATAATGCCAAGACAAAGCCACGGGAGGAGCAG
TTCCAAAGCACGTTCCGTGTGGTCAGCGTCCTCACCGTCGTGCACCAGGACTGGCTGAACGGCAAGGAGTACAAGTGC
AAGGTCTCCAACAAAGGCCTCCCAGCCCCCATCGAGAAAACCATCTCCAAAACCAAAGGGCAGCCCCGAGAACCACAG
GTGTACACCCTGCCCCCATCCCGGGAGGAGATGACCAAGAACCAGGTCAGCCTGACCTGCCTGGTCAAAGGCTTCTAC
CCCAGCGACATCGCCGTGGAGTGGGAGAGCAATGGGCAGCCGGAGAACAACTACAAGACCACGCCTCCCATGCTGGAC
TCCGACGGCTCCTTCTTCCTCTACAGCAAGCTCACCGTGGACAAGAGCAGGTGGCAGCAGGGGAACGTCTTCTCATGC
TCCGTGATGCATGAGGCTCTGCACAACCACTACACGCAGAAGAGCCTCTCCCTGTCTCCGGGTGGTGGAGGTGGGTCT
GGAGGTGGAGGATCTGGTGGAGGTGGGTCTGAAGTCAGGCCCGAGGAACCTCTAGTGGTGAAGGTGGAAGAGGGAGAT
AACGCTGTGCTGCAGTGCCTCAAGGGGACCTCAGATGGCCCCACTCAGCAGCTGACCTGGTCTCGGGAGTCCCCGCTT
AAACCCTTCTTAAAACTCAGCCTGGGGCTGCCAGGCCTGGGAATCCACATGAGGCCCCTGGCCATCTGGCTTTTCATC
TTCAACGTCTCTCAACAGATGGGGGGCTTCTACCTGTGCCAGCCGGGGCCCCCCTCTGAGAAGGCCTGGCAGCCTGGC
TGGACAGTCAATGTGGAGGGCAGCGGG
SEQID NO. 207
ATGGAGTTTGGGCTGAGCTGGGTTTTCCTCGTTGCTCTTTTTAGAGGTGTCCAGTGTCAGGTTCAGCTGGTGCAGTCT
GGTGCTGAGGTGAAGAAGCCTGGTGCCTCAGTGAAGGTCTCCTGCAAGGCTTCTGGTTACACATTCACTGACTACTAC
ATGCACTGGGTGCGTCAGGCCCCTGGTCAAGGTCTTGAGTGGATGGGTCGTGTTAATCCTAACCGGAGGGGTACTACC
TACAACCAGAAATTCGAGGGCCGTGTCACCATGACCACAGACACATCCACGAGCACAGCCTACATGGAGCTGCGTAGC
CTGCGTTCTGACGACACGGCCGTGTATTACTGTGCGCGTGCGAACTGGCTTGACTACTGGGGCCAGGGCACCACCGTC
ACCGTCTCCTCCGCCTCCACCAAGGGCCCATCGGTCTTCCCGCTAGCGCCCTGCTCCAGGAGCACCTCCGAGAGCACA
GCCGCCCTGGGCTGCCTGGTCAAGGACTACTTCCCCGAACCGGTGACGGTGTCGTGGAACTCAGGCGCCCTGACCAGC
GGCGTGCACACCTTCCCGGCTGTCCTACAGTCCTCAGGACTCTACTCCCTCAGCAGCGTGGTGACCGTGCCCTCCAGC
AGCTTGGGCACGAAGACCTACACCTGCAACGTAGATCACAAGCCCAGCAACACCAAGGTGGACAAGAGAGTTGAGTCC
AAATATGGTCCCCCATGCCCACCCTGCCCAGCACCTGAGGCCGCCGGGGGACCATCAGTCTTCCTGTTCCCCCCAAAA
CCCAAGGACACTCTCATGATCTCCCGGACCCCTGAGGTCACGTGCGTGGTGGTGGACGTGAGCCAGGAAGACCCCGAG
GTCCAGTTCAACTGGTACGTGGATGGCGTGGAGGTGCATAATGCCAAGACAAAGCCGCGGGAGGAGCAGTTCAACAGC
ACGTACCGTGTGGTCAGCGTCCTCACCGTCCTGCACCAGGACTGGCTGAACGGCAAGGAGTACAAGTGCAAGGTCTCC
AACAAAGGCCTCCCGTCCTCCATCGAGAAAACCATCTCCAAAGCCAAAGGGCAGCCCCGAGAGCCACAGGTGTACACC
CTGCCCCCATCCCAGGAGGAGATGACCAAGAACCAGGTCAGCCTGACCTGCCTGGTCAAAGGCTTCTACCCCAGCGAC
ATCGCCGTGGAGTGGGAAAGCAATGGGCAGCCGGAGAACAACTACAAGACCACGCCTCCCGTGCTGGACTCCGACGGC
TCCTTCTTCCTCTACAGCAGGCTAACCGTGGACAAGAGCAGGTGGCAGGAGGGGAATGTCTTCTCATGCTCCGTGATG
CATGAGGCTCTGCACAACCACTACACACAGAAGAGCCTCTCCCTGTCTCTGGGT
SEQID NO. 208
ATGCCACCTCCTCGCCTCCTCTTCTTCCTCCTCTTCCTCACCCCCATGGAAGTCAGGCCCGAGGAACCTCTAGTGGTG
AAGGTGGAAGAGGGAGATAACGCTGTGCTGCAGTGCCTCAAGGGGACCTCAGATGGCCCCACTCAGCAGCTGACCTGG
TCTCGGGAGTCCCCGCTTAAACCCTTCTTAAAACTCAGCCTGGGGCTGCCAGGCCTGGGAATCCACATGAGGCCCCTG
GCCATCTGGCTTTTCATCTTCAACGTCTCTCAACAGATGGGGGGCTTCTACCTGTGCCAGCCGGGGCCCCCCTCTGAG
AAGGCCTGGCAGCCTGGCTGGACAGTCAATGTGGAGGGCAGCGGGGGAGGTGGGTCTGGAGGTGGAGGATCTGGTGGA
GGTGGGTCTGACATCCAGATGACCCAGTCTCCATCCTCCCTGTCTGCATCTGTAGGAGACAGAGTCACCATCACTTGC
AGTGTCAGCTCAAGTGTATCCTCCATTTACTTGCACTGGTATCAGCAGAAACCAGGGAAAGCCCCTAAGCTCCTGATC
TATAGCACATCCAACTTGGCTTCTGGAGTCCCATCAAGGTTCAGTGGCAGTGGATCTGGGACAGATTTCACTCTCACC
ATCAGCAGTCTGCAACCTGAAGATTTTGCAACTTACTACTGTCAAGTCTACAGTGGTTACCCGCTCACGTTCGGCGGA
GGGACCAAGGTGGAGATCAAACGAACTGTGGCTGCACCATCTGTCTTCATCTTCCCGCCATCTGATGAGCAGTTGAAA
TCTGGAACTGCCTCTGTTGTGTGCCTGCTGAATAACTTCTATCCCAGAGAGGCCAAAGTACAGTGGAAGGTGGATAAC
GCCCTCCAATCGGGTAACTCCCAGGAGAGTGTCACAGAGCAGGACAGCAAGGACAGCACCTACAGCCTCAGCAGCACC
CTGACGCTGAGCAAAGCAGACTACGAGAAACACAAAGTCTACGCCTGCGAAGTCACCCATCAGGGCCTGAGCTCGCCC
GTCACAAAGAGCTTCAACAGGGGAGAGTGCTAATA
SEQID NO. 209
ATGCCACCTCCTCGCCTCCTCTTCTTCCTCCTCTTCCTCACCCCCATGGAAGTCAGGCCCGAGGAACCTCTAGTGGTG
AAGGTGGAAGAGGGAGATAACGCTGTGCTGCAGTGCCTCAAGGGGACCTCAGATGGCCCCACTCAGCAGCTGACCTGG
TCTCGGGAGTCCCCGCTTAAACCCTTCTTAAAACTCAGCCTGGGGCTGCCAGGCCTGGGAATCCACATGAGGCCCCTG
GCCATCTGGCTTTTCATCTTCAACGTCTCTCAACAGATGGGGGGCTTCTACCTGTGCCAGCCGGGGCCCCCCTCTGAG
AAGGCCTGGCAGCCTGGCTGGACAGTCAATGTGGAGGGCAGCGGGGGAGGTGGGTCTGGAGGTGGAGGATCTGGTGGA
GGTGGGTCTCAGGTTCAGCTGGTGCAGTCTGGTGCTGAGGTGAAGAAGCCTGGTGCCTCAGTGAAGGTCTCCTGCAAG
GCTTCTGGTTACACATTCACTGACTACTACATGCACTGGGTGCGTCAGGCCCCTGGTCAAGGTCTTGAGTGGATGGGT
CGTGTTAATCCTAACCGGAGGGGTACTACCTACAACCAGAAATTCGAGGGCCGTGTCACCATGACCACAGACACATCC
ACGAGCACAGCCTACATGGAGCTGCGTAGCCTGCGTTCTGACGACACGGCCGTGTATTACTGTGCGCGTGCGAACTGG
CTTGACTACTGGGGCCAGGGCACCACCGTCACCGTCTCCTCCGCCTCCACCAAGGGCCCATCGGTCTTCCCGCTAGCG
CCCTGCTCCAGGAGCACCTCCGAGAGCACAGCCGCCCTGGGCTGCCTGGTCAAGGACTACTTCCCCG
AACCGGTGACGGTGTCGTGGAACTCAGGCGCCCTGACCAGCGGCGTGCACACCTTCCCGGCTGTCCTACAGTCCTCAG
GACTCTACTCCCTCAGCAGCGTGGTGACCGTGCCCTCCAGCAGCTTGGGCACGAAGACCTACACCTGCAACGTAGATC
ACAAGCCCAGCAACACCAAGGTGGACAAGAGAGTTGAGTCCAAATATGGTCCCCCATGCCCACCCTGCCCAGCACCTG
AGGCCGCCGGGGGACCATCAGTCTTCCTGTTCCCCCCAAAACCCAAGGACACTCTCATGATCTCCCGGACCCCTGAGG
TCACGTGCGTGGTGGTGGACGTGAGCCAGGAAGACCCCGAGGTCCAGTTCAACTGGTACGTGGATGGCGTGGAGGTGC
ATAATGCCAAGACAAAGCCGCGGGAGGAGCAGTTCAACAGCACGTACCGTGTGGTCAGCGTCCTCACCGTCCTGCACC
AGGACTGGCTGAACGGCAAGGAGTACAAGTGCAAGGTCTCCAACAAAGGCCTCCCGTCCTCCATCGAGAAAACCATCT
CCAAAGCCAAAGGGCAGCCCCGAGAGCCACAGGTGTACACCCTGCCCCCATCCCAGGAGGAGATGACCAAGAACCAGG
TCAGCCTGACCTGCCTGGTCAAAGGCTTCTACCCCAGCGACATCGCCGTGGAGTGGGAAAGCAATGGGCAGCCGGAGA
ACAACTACAAGACCACGCCTCCCGTGCTGGACTCCGACGGCTCCTTCTTCCTCTACAGCAGGCTAACCGTGGACAAGA
GCAGGTGGCAGGAGGGGAATGTCTTCTCATGCTCCGTGATGCATGAGGCTCTGCACAACCACTACACACAGAAGAGCC
TCTCCCTGTCTCTG
SEQID NO. 210
ATGGAGACAGACACACTCCTGCTATGGGTACTGCTGCTCTGGGTTCCAGGTTCCACTGGTGACATCCAGATGACCCAG
TCTCCATCCTCCCTGTCTGCATCTGTAGGAGACAGAGTCACCATCACTTGCAGTGTCAGCTCAAGTGTATCCTCCATT
TACTTGCACTGGTATCAGCAGAAACCAGGGAAAGCCCCTAAGCTCCTGATCTATAGCACATCCAACTTGGCTTCTGGA
GTCCCATCAAGGTTCAGTGGCAGTGGATCTGGGACAGATTTCACTCTCACCATCAGCAGTCTGCAACCTGAAGATTTT
GCAACTTACTACTGTCAAGTCTACAGTGGTTACCCGCTCACGTTCGGCGGAGGGACCAAGGTGGAGATCAAACGAACT
GTGGCTGCACCATCTGTCTTCATCTTCCCGCCATCTGATGAGCAGTTGAAATCTGGAACTGCCTCTGTTGTGTGCCTG
CTGAATAACTTCTATCCCAGAGAGGCCAAAGTACAGTGGAAGGTGGATAACGCCCTCCAATCGGGTAACTCCCAGGAG
AGTGTCACAGAGCAGGACAGCAAGGACAGCACCTACAGCCTCAGCAGCACCCTGACGCTGAGCAAAGCAGACTACGAG
AAACACAAAGTCTACGCCTGCGAAGTCACCCATCAGGGCCTGAGCTCGCCCGTCACAAAGAGCTTCAACAGGGGAGAG
TGC
SEQID NO. 211
ATGGAGACAGACACACTCCTGCTATGGGTACTGCTGCTCTGGGTTCCAGGTTCCACTGGTGACATCCAGATGACCCAG
TCTCCATCCTCCCTGTCTGCATCTGTAGGAGACAGAGTCACCATCACTTGCAGTGTCAGCTCAAGTGTATCCTCCATT
TACTTGCACTGGTATCAGCAGAAACCAGGGAAAGCCCCTAAGCTCCTGATCTATAGCACATCCAACTTGGCTTCTGGA
GTCCCATCAAGGTTCAGTGGCAGTGGATCTGGGACAGATTTCACTCTCACCATCAGCAGTCTGCAACCTGAAGATTTT
GCAACTTACTACTGTCAAGTCTACAGTGGTTACCCGCTCACGTTCGGCGGAGGGACCAAGGTGGAGATCAAACGAACT
GTGGCTGCACCATCTGTCTTCATCTTCCCGCCATCTGATGAGCAGTTGAAATCTGGAACTGCCTCTGTTGTGTGCCTG
CTGAATAACTTCTATCCCAGAGAGGCCAAAGTACAGTGGAAGGTGGATAACGCCCTCCAATCGGGTAACTCCCAGGAG
AGTGTCACAGAGCAGGACAGCAAGGACAGCACCTACAGCCTCAGCAGCACCCTGACGCTGAGCAAAGCAGACTACGAG
AAACACAAAGTCTACGCCTGCGAAGTCACCCATCAGGGCCTGAGCTCGCCCGTCACAAAGAGCTTCAACAGGGGAGAG
TGCGACAAAACTCACACATCGCCACCGTCCCCAGCACCTGAAGCCGCGGGGGGACCGTCAGAAGTCAGGCCCGAGGAA
CCTCTAGTGGTGAAGGTGGAAGAGGGAGATAACGCTGTGCTGCAGTGCCTCAAGGGGACCTCAGATGGCCCCACTCAG
CAGCTGACCTGGTCTCGGGAGTCCCCGCTTAAACCCTTCTTAAAACTCAGCCTGGGGCTGCCAGGCCTGGGAATCCAC
ATGAGGCCCCTGGCCATCTGGCTTTTCATCTTCAACGTCTCTCAACAGATGGGGGGCTTCTACCTGTGCCAGCCGGGG
CCCCCCTCTGAGAAGGCCTGGCAGCCTGGCTGGACAGTCAATGTGGAGGGCAGCGGG
SEQID NO. 212
ATGGAGTTTGGGCTGAGCTGGGTTTTCCTCGTTGCTCTTTTTAGAGGTGTCCAGTGTCAGGTTCAGCTGGTGCAGTCT
GGTGCTGAGGTGAAGAAGCCTGGTGCCTCAGTGAAGGTCTCCTGCAAGGCTTCTGGTTACACATTCACTGACTACTAC
ATGCACTGGGTGCGTCAGGCCCCTGGTCAAGGTCTTGAGTGGATGGGTCGTGTTAATCCTAACCGGAGGGGTACTACC
TACAACCAGAAATTCGAGGGCCGTGTCACCATGACCACAGACACATCCACGAGCACAGCCTACATGGAGCTGCGTAGC
CTGCGTTCTGACGACACGGCCGTGTATTACTGTGCGCGTGCGAACTGGCTTGACTACTGGGGCCAGGGCACCACCGTC
ACCGTCTCCTCCGCCTCCACCAAGGGCCCATCGGTCTTCCCGCTAGCGCCCTGCTCCAGGAGCACCTCCGAGAGCACA
GCCGCCCTGGGCTGCCTGGTCAAGGACTACTTCCCCGAACCGGTGACGGTGTCGTGGAACTCAGGCGCCCTGACCAGC
GGCGTGCACACCTTCCCGGCTGTCCTACAGTCCTCAGGACTCTACTCCCTCAGCAGCGTGGTGACCGTGCCCTCCAGC
AGCTTGGGCACGAAGACCTACACCTGCAACGTAGATCACAAGCCCAGCAACACCAAGGTGGACAAGAGAGTTGAGTCC
AAATATGGTCCCCCATGCCCACCCTGCCCAGCACCTGAGGCCGCCGGGGGACCATCAGTCTTCCTGTTCCCCCCAAAA
CCCAAGGACACTCTCATGATCTCCCGGACCCCTGAGGTCACGTGCGTGGTGGTGGACGTGAGCCAGGAAGACCCCGAG
GTCCAGTTCAACTGGTACGTGGATGGCGTGGAGGTGCATAATGCCAAGACAAAGCCGCGGGAGGAGCAGTTCAACAGC
ACGTACCGTGTGGTCAGCGTCCTCACCGTCCTGCACCAGGACTGGCTGAACGGCAAGGAGTACAAGTGCAAGGTCTCC
AACAAAGGCCTCCCGTCCTCCATCGAGAAAACCATCTCCAAAGCCAAAGGGCAGCCCCGAGAGCCACAGGTGTACACC
CTGCCCCCATCCCAGGAGGAGATGACCAAGAACCAGGTCAGCCTGACCTGCCTGGTCAAAGGCTTCTACCCCAGCGAC
ATCGCCGTGGAGTGGGAAAGCAATGGGCAGCCGGAGAACAACTACAAGACCACGCCTCCCGTGCTGGACTCCGACGGC
TCCTTCTTCCTCTACAGCAGGCTAACCGTGGACAAGAGCAGGTGGCAGGAGGGGAATGTCTTCTCATGCTCCGTGATG
CATGAGGCTCTGCACAACCACTACACACAGAAGAGCCTCTCCCTGTCTCTGGGTGGTGGAGGTGGGTCTGGAGGTGGA
GGATCTGGTGGAGGTGGGTCTGAAGTCAGGCCCGAGGAACCTCTAGTGGTGAAGGTGGAAGAGGGAGATAACGCTGTG
CTGCAGTGCCTCAAGGGGACCTCAGATGGCCCCACTCAGCAGCTGACCTGGTCTCGGGAGTCCCCGCTTAAACCCTTC
TTAAAACTCAGCCTGGGGCTGCCAGGCCTGGGAATCCACATGAGGCCCCTGGCCATCTGGCTTTTCATCTTCAACGTC
TCTCAACAGATGGGGGGCTTCTACCTGTGCCAGCCGGGGCCCCCCTCTGAGAAGGCCTGGCAGCCTGGCTGGACAGTC
AATGTGGAGGGCAGCGGG
SEQID NO. 213
ATGGAGACAGACACACTCCTGCTATGGGTACTGCTGCTCTGGGTTCCAGGTTCCACTGGTGACATCCAGATGACACAG
ACTACATCCTCCCTGTCTGCCTCTCTGGGAGACAGAGTCACCATCAGTTGCAGGGCAAGTCAGGACATTAGTAAATAT
TTAAATTGGTATCAGCAGAAACCAGATGGAACTGTTAAACTCCTGATCTACCATACATCAAGATTACACTCAGGAGTC
CCATCAAGGTTCAGTGGCAGTGGGTCTGGAACAGATTATTCTCTCACCATTAGCAACCTGGAGCAAGAAGATATTGCC
ACTTACTTTTGCCAACAGGGTAATACGCTTCCGTACACGTTCGGAGGGGGGACTAAGTTGGAAATAACAGGAGGAGGT
GGGTCTGGAGGTGGAGGATCTGGTGGAGGTGGGTCTGGAGGAGGTGGGTCTGAGGTGAAACTGCAGGAGTCAGGACCT
GGCCTGGTGGCGCCCTCACAGAGCCTGTCCGTCACATGCACTGTCTCAGGGGTCTCATTACCCGACTATGGTGTAAGC
TGGATTCGCCAGCCTCCACGAAAGGGTCTGGAGTGGCTGGGAGTAATATGGGGTAGTGAAACCACATACTATAATTCA
GCTCTCAAATCCAGACTGACCATCATCAAGGACAACTCCAAGAGCCAAGTTTTCTTAAAAATGAACAGTCTGCAAACT
GATGACACAGCCATTTACTACTGTGCCAAACATTATTACTACGGTGGTAGCTATGCTATGGACTACTGGGGTCAAGGA
ACCTCAGTCACCGTCTCCTCACCGAGCCAGTTCCGGGTGTCGCCGCTGGATCGGACCTGGAACCTGGGCGAGACAGTG
GAGCTGAAGTGCCAGGTGCTGCTGTCCAACCCGACGTCGGGCTGCTCGTGGCTCTTCCAGCCGCGCGGCGCCGCCGCC
AGTCCCACCTTCCTCCTATACCTCTCCCAAAACAAGCCCAAGGCGGCCGAGGGGCTGGACACCCAGCGGTTCTCGGGC
AAGAGGTTGGGGGACACCTTCGTCCTCACCCTGAGCGACTTCCGCCGAGAGAACGAGGGCTACTATTTCTGCTCGGCC
CTGAGCAACTCCATCATGTACTTCAGCCACTTCGTGCCGGTCTTCCTGCCAGCGAAGCCCACCACGACGCCAGCGCCG
CGACCACCAACACCGGCGCCCACCATCGCGTCGCAGCCCCTGTCCCTGCGCCCAGAGGCGTGCCGGCCAGCGGCGGGG
GGCGCAGTGCACACGAGGGGGCTGGACTTCGCCTGTGATATCTACATCTGGGCGCCCTTGGCCGGGACTTGTGGGGTC
CTTCTCCTGTCACTGGTTATCACCAGGAGTAAGAGGAGCAGGCTCCTGCACAGTGACTACATGAACATGACTCCCCGC
CGCCCCGGGCCCACCCGCAAGCATTACCAGCCCTATGCCCCACCACGCGACTTCGCAGCCTATCGCTCCAAACGGGGC
AGAAAGAAACTCCTGTATATATTCAAACAACCATTTATGAGACCAGTACAAACTACTCAAGAGGAAGATGGCTGTAGC
TGCCGATTTCCAGAAGAAGAAGAAGGAGGATGTGAACTGAGAGTGAAGTTCAGCAGGAGCGCAGACGCCCCCGCGTAC
CAGCAGGGCCAGAACCAGCTCTATAACGAGCTCAATCTAGGACGAAGAGAGGAGTACGATGTTTTGGACAAGAGACGT
GGCCGGGACCCTGAGATGGGGGGAAAGCCGCAGAGAAGGAAGAACCCTCAGGAAGGCCTGTACAATGAACTGCAGAAA
GATAAGATGGCGGAGGCCTACAGTGAGATTGGGATGAAAGGCGAGCGCCGGAGGGGCAAGGGGCACGATGGCCTTTAC
CAGGGTCTCAGTACAGCCACCAAGGACACCTACGACGCCCTTCACATGCAGGCCCTGCCCCCTCGC
SEQID NO. 214
ATGCCACCTCCTCGCCTCCTCTTCTTCCTCCTCTTCCTCACCCCCATGGAAGTCAGGCCCGAGGAACCTCTAGTGGTG
AAGGTGGAAGAGGGAGATAACGCTGTGCTGCAGTGCCTCAAGGGGACCTCAGATGGCCCCACTCAGCAGCTGACCTGG
TCTCGGGAGTCCCCGCTTAAACCCTTCTTAAAACTCAGCCTGGGGCTGCCAGGCCTGGGAATCCACATGAGGCCCCTG
GCCATCTGGCTTTTCATCTTCAACGTCTCTCAACAGATGGGGGGCTTCTACCTGTGCCAGCCGGGGCCCCCCTCTGAG
AAGGCCTGGCAGCCTGGCTGGACAGTCAATGTGGAGGGCAGCGGGCATCATCACCATCACCAT
SEQID NO. 215
ATGCCACCTCCTCGCCTCCTCTTCTTCCTCCTCTTCCTCACCCCCATGGAAGTCAGGCCCGAGGAACCTCTAGTGGTG
AAGGTGGAAGAGGGAGATAACGCTGTGCTGCAGTGCCTCAAGGGGACCTCAGATGGCCCCACTCAGCAGCTGACCTGG
TCTCGGGAGTCCCCGCTTAAACCCTTCTTAAAACTCAGCCTGGGGCTGCCAGGCCTGGGAATCCACATGAGGCCCCTG
GCCATCTGGCTTTTCATCTTCAACGTCTCTCAACAGATGGGGGGCTTCTACCTGTGCCAGCCGGGGCCCCCCTCTGAG
AAGGCCTGGCAGCCTGGCTGGACAGTCAATGTGGAGGGCAGCGGGGACAAAACTCACACATGCCCACCGTGCCCAGCA
CCTGAACTCCTGGGGGGACCGTCAGTCTTCCTCTTCCCCCCAAAACCCAAGGACACCCTCATGATCTCCCGGACCCCT
GAGGTCACATGCGTGGTGGTGGACGTGAGCCACGAAGACCCTGAGGTCAAGTTCAACTGGTACGTGGACGGCGTGGAG
GTGCATAATGCCAAGACAAAGCCGCGGGAGGAGCAGTACAACAGCACGTACCGTGTGGTCAGCGTCCTCACCGTCCTG
CACCAGGACTGGCTGAATGGCAAGGAGTACAAGTGCAAGGTCTCCAACAAAGCCCTCCCAGCCCCCATCGAGAAAACC
ATCTCCAAAGCCAAAGGGCAGCCCCGAGAACCACAGGTGTACACCCTGCCCCCATCCCGGGAGGAGATGACCAAGAAC
CAGGTCAGCCTGACCTGCCTGGTCAAAGGCTTCTATCCCAGCGACATCGCCGTGGAGTGGGAGAGCAATGGGCAGCCG
GAGAACAACTACAAGACCACGCCTCCCGTGCTGGACTCCGACGGCTCCTTCTTCCTCTACAGCAAGCTCACCGTGGAC
AAGAGCAGGTGGCAGCAGGGGAACGTCTTCTCATGCTCCGTGATGCACGAGGCTCTGCACAACCACTACACGCAGAAG
AGCCTCTCCCTGTCTCCGGGT
SEQID NO. 216
ATGGAGTTTGGGCTGAGCTGGGTTTTCCTCGTTGCTCTTTTTAGAGGTGTCCAGTGTGAGGTGCAGCTGGTGGAGTCT
GGTGGTGGTCTTGTTCAACCTGGTGGTTCTCTTCGTCTTTCTTGTGCTGCTTCTGGTTTTAATATTAAAGATACTTAT
ATTCATTGGGTTCGTCAAGCTCCTGGTAAAGGTCTTGAATGGGTTGCTCGTATTTATCCTACTAATGGTTATACTCGT
TATGCTGATTCTGTTAAAGGTCGTTTTACTATTTCTGCTGATACTTCTAAAAATACTGCTTATCTTCAAATGAACTCT
CTTCGTGCTGAAGATACTGCTGTTTATTATTGTTCTCGTTGGGGTGGTGATGGTTTTTATGCTATGGATTATTGGGGT
CAAGGTACTCTTGTCACCGTCTCCTCAGCTAGCACCGGGGGAGGTGGGTCTGGAGGTGGAGGATCTGGTGGAGGTGGG
TCTGACATCCAGATGACCCAGTCTCCTTCTTCTCTTTCTGCTTCTGTTGGTGATCGTGTTACTATTACTTGTCGTGCT
TCTCAAGATGTTAATACTGCTGTTGCTTGGTATCAACAAAAACCTGGTAAAGCTCCTAAACTTCTTATTTATTCTGCT
TCTTTTCTTTATTCTGGTGTTCCTTCTCGTTTTTCTGGTTCTCGTTCTGGTACTGATTTTACTCTTACTATTTCTTCT
CTTCAACCTGAAGATTTTGCTACTTATTATTGTCAACAACATTATACTACTCCTCCTACTTTTGGTCAAGGTACCAAG
GTGGAGATCAAACGTACGGGGCCCCATCATCACCATCACCAT
SEQID NO. 217
ATGGAGTTTGGGCTGAGCTGGGTTTTCCTCGTTGCTCTTTTTAGAGGTGTCCAGTGTCAGGTGCAGCTGGTGCAGAGC
GGCGCCGAGGACAAGAAGCCCGGCGAGAGCGTGAAGATCAGCTGCAAGGCCAGCGGCTACACCTTCACCAACTACGGC
ATGAACTGGGTGAGGCAGGCCCCCGGCCAGGGCCTGAAGTGGATGGGCTGGATCAACACCTACACCGGCGAGAGCACC
TACGCCGACGACTTCAAGGGCAGGTTCGCCTTCAGCCTGGACACCAGCGCCAGCACCGCCTACCTGCAGCTGAGCAGC
CTGAGGGGCGAGGACACCGCCGTGTACTTCTGCGCCAGGTTCGCCATCAAGGGCGACTACTGGGGCCAGGGCACCACC
GTGACCGTGAGCAGCGCCAGCACCGGCGGCGGCGGCAGCGGCGGCGGCGGCAGCGGCGGCGGCGGCAGCGGCGGCGGC
GGCAGCGACATCGTGATGACCCAGAGCCCCCTGAGCCTGGAGGTGAGCCCCGGCGAGCCCGCCAGCATCAGCTGCAGG
AGCACCAAGAGCCTGCTGCACAGCGACGGCATCACCTACCTGTACTGGTACCTGCAGAAGCCCGGCCAGAGCCCCCAG
CTGCTGATCTACCAGCTGAGCAACCTGGCCAGCGGCGTGCCCGACAGGTTCAGCAGCAGCGGCAGCGGCACCGACTTC
ACCCTGAAGATCAGCAGGGTGGAGGCCGAGGACGAGGGCACCTACTACTGCGCCCAGAACCTGGAGATCCCCAGGACC
TTCGGCCAGGGCACCAAGCTGGAGATCAAGAGGACCGGGCCCCATCATCACCATCACCAT
SEQID NO. 218
ATGGAGACAGACACACTCCTGCTATGGGTACTGCTGCTCTGGGTTCCAGGTTCCACTGGTGACATCGTGATGACCCAG
AGCCCCCTGAGCCTGCCCGTGACCCCCGGCGAGCCCGCCAGCATCAGCTGCAGGAGCACCAAGAGCCTGCTGCACAGC
GACGGCATCACCTACCTGTACTGGTACCTGCAGAAGCCCGGCCAGAGCCCCCAGCTGCTGATCTACCAGCTGAGCAAC
CTGGCCAGCGGCGTGCCCGACAGGTTCAGCAGCAGCGGCAGCGGCACCGACTTCACCCTGAAGATCAGCAGGGTGGAG
GCCGAGGACGAGGGCGTGTACTACTGCGCCCAGAACCTGGAGATCCCCAGGACCTTCGGCTGCGGCACCAAGCTGGAG
ATCAAGAGGACCGGCGGCGGCGGCAGCGGCGGCGGCGGCAGCGGCGGCGGCGGCAGCGGCGGCGGCGGCAGCCAGGTG
CAGCTGGTGCAGAGCGGCGCCGAGGTGAAGAAGCCCGGCGAGAGCGTGAAGATCAGCTGCAAGGCCAGCGGCTACACC
TTCACCAACTACGGCATGAACTGGGTGAGGCAGGCCCCCGGCCAGTGCCTGAAGTGGATGGGCTGGATCAACACCTAC
ACCGGCGAGAGCACCTACGCCGACGACTTCAAGGGCAGGTTCGCCTTCAGCCTGGACACCAGCGCCAGCACCGCCTAC
CTGCAGCTGAGCAGCCTGAGGAGCGAGGACACCGCCGTGTACTTCTGCGCCAGGTTCGCCATCAAGGGCGACTACTGG
GGCCAGGGCACCCTGGTGACCGTGAGCAGCGGGCCCCATCATCACCATCACCAT
SEQID NO. 219
ATGGAGTTTGGGCTGAGCTGGGTTTTCCTCGTTGCTCTTTTTAGAGGTGTCCAGTGTCAGGTTCAGCTGGTGCAGTCT
GGTGCTGAGGATGTGAAGCCTGATGCCTCAGTGAAGCTCTCCTGCAAGGCTTCTGGTTACACATTCACTGACTACTAC
ATGCACTGGGTGCGTCAGGCCCCTGGTCAAGGTCTTGAGTGGATGGGTCGTGTTAATCCTAACCGGAGGGGTACTACC
TACAACCAGAAATTCGAGGGCCGTGTCACCATGACCACAGACACATCCACGAGCACAGCCTACATGCAGCTGAGTAGC
CTGCGTGGTGAAGACACGGCCGTGTATTACTGTGCGCGTGCGAACTGGCTTGACTACTGGGGCCAGGGCACCACCGTC
ACCGTCTCCTCCGCCTCCACCGGGGGAGGTGGGTCTGGAGGTGGAGGATCTGGTGGAGGTGGGTCTGGTGGAGGTGGG
TCTGACATCCAGATGACCCAGTCTCCATCCTCCCTGGAGGCATCTGTAGGAGACAGAGTCACCATCACTTGCAGTGTC
AGCTCAAGTGTATCCTCCATTTACTTGCACTGGTATCAGCAGAAACCAGGGAAAAGCCCTAAGCTCCTGATCTATAGC
ACATCCAACTTGGCTTCTGGAGTCCCAGATAGGTTCAGTGGCAGTGGATCTGGGACAGATTTCACTCTCACCATCAGC
AGTCTGCAAGCCGAAGATGAGGGCACTTACTACTGTCAAGTCTACAGTGGTTACCCGCTCACGTTCGGCGGAGGGACC
AAGCTGGAGATCAAACGAACTGGGCCCCATCATCACCATCACCAT
SEQID NO. 220
ATGGAGACAGACACACTCCTGCTATGGGTACTGCTGCTCTGGGTTCCAGGTTCCACTGGTGACATCCAGATGACCCAG
TCTCCATCCTCCCTGTCTGCATCTGTAGGAGACAGAGTCACCATCACTTGCAGTGTCAGCTCAAGTGTATCCTCCATT
TACTTGCACTGGTATCAGCAGAAACCAGGGAAAGCCCCTAAGCTCCTGATCTATAGCACATCCAACTTGGCTTCTGGA
GTCCCATCAAGGTTCAGTGGCAGTGGATCTGGGACAGATTTCACTCTCACCATCAGCAGTCTGCAACCTGAAGATGAA
GCAACTTACTACTGTCAAGTCTACAGTGGTTACCCGCTCACGTTCGGCTGCGGGACCAAGGTGGAGATCAAACGAACT
GGGGGAGGTGGGTCTGGAGGTGGAGGATCTGGTGGAGGTGGGTCTGGTGGAGGTGGGTCTCAGGTTCAGCTGGTGCAG
TCTGGTGCTGAGGATAAGAAGCCTGGTGCCTCAGTGAAGGTCTCCTGCAAGGCTTCTGGTTACACATTCACTGACTAC
TACATGCACTGGGTGCGTCAGGCCCCTGGTCAATGTCTTGAGTGGATGGGTCGTGTTAATCCTAACCGGAGGGGTACT
ACCTACAACCAGAAATTCGAGGGCCGTGTCACCATGACCACAGACACATCCACGAGCACAGCCTACATGGAGCTGCGT
AGCCTGCGTTCTGACGACACGGCCGTGTATTACTGTGCGCGTGCGAACTGGCTTGACTACTGGGGCCAGGGCACCACC
GTCACCGTCTCCTCCGGGCCCCATCATCACCATCACCAT
SEQID NO. 221
ATGGAGTTTGGGCTGAGCTGGGTTTTCCTCGTTGCTCTTTTTAGAGGTGTCCAGTGTCAGGTGCAGCTGCAGGAGAGC
GGCCCCGGCGACGTGAAGCCCAGCGAGACCCTGAGCCTGACCTGCACCGTGAGCGGCGGCAGCGTGAGCAGCGGCGAC
TACTACTGGACCTGGATCAGGCAGAGCCCCGGCAAGGGCCTGGAGTGGATCGGCCACATCTACTACAGCGGCAACACC
AACTACAACCCCAGCCTGAAGAGCAGGCTGACCATCAGCATCGACACCAGCAAGACCACCTTCAGCCTGCAGCTGAGC
AGCGTGACCGGCGAGGACACCGCCATCTACTACTGCGTGAGGGACAGGGTGACCGGCGCCTTCGACATCTGGGGCCAG
GGCACCACCGTGACCGTGAGCAGCGCCAGCACCGGCGGCGGCGGCAGCGGCGGCGGCGGCAGCGGCGGCGGCGGCAGC
GGCGGCGGCGGCAGCGACATCCAGATGACCCAGAGCCCCAGCAGCCTGGAGGCCAGCGTGGGCGACAGGGTGACCATC
ACCTGCCAGGCCAGCCAGGACATCAGCAACTACCTGAACTGGTACCAGCAGAAGCCCGGCAAGAGCCCCAAGCTGCTG
ATCTACGACGCCAGCAACCTGGAGACCGGCGTGCCCGACAGGTTCAGCGGCAGCGGCAGCGGCACCGACTTCACCTTC
ACCATCAGCAGCCTGCAGGCCGAGGACGAGGGCACCTACTTCTGCCAGCACTTCGACCACCTGCCCCTGGCCTTCGGC
GGCGGCACCAAGCTGGAGATCAAGAGGACCGGGCCCCATCATCACCATCACCAT
SEQID NO. 222
ATGGAGACAGACACACTCCTGCTATGGGTACTGCTGCTCTGGGTTCCAGGTTCCACTGGTGACATCCAGATGACCCAG
AGCCCCAGCAGCCTGAGCGCCAGCGTGGGCGACAGGGTGACCATCACCTGCCAGGCCAGCCAGGACATCAGCAACTAC
CTGAACTGGTACCAGCAGAAGCCCGGCAAGGCCCCCAAGCTGCTGATCTACGACGCCAGCAACCTGGAGACCGGCGTG
CCCAGCAGGTTCAGCGGCAGCGGCAGCGGCACCGACTTCACCTTCACCATCAGCAGCCTGCAGCCCGAGGACGAGGCC
ACCTACTTCTGCCAGCACTTCGACCACCTGCCCCTGGCCTTCGGCTGCGGCACCAAGGTGGAGATCAAGAGGACCGGC
GGCGGCGGCAGCGGCGGCGGCGGCAGCGGCGGCGGCGGCAGCGGCGGCGGCGGCAGCCAGGTGCAGCTGCAGGAGAGC
GGCCCCGGCGACGTGAAGCCCAGCGAGACCCTGAGCCTGACCTGCACCGTGAGCGGCGGCAGCGTGAGCAGCGGCGAC
TACTACTGGACCTGGATCAGGCAGAGCCCCGGCAAGTGCCTGGAGTGGATCGGCCACATCTACTACAGCGGCAACACC
AACTACAACCCCAGCCTGAAGAGCAGGCTGACCATCAGCATCGACACCAGCAAGACCCAGTTCAGCCTGAAGCTGAGC
AGCGTGACCGCCGCCGACACCGCCATCTACTACTGCGTGAGGGACAGGGTGACCGGCGCCTTCGACATCTGGGGCCAG
GGCACCACCGTGACCGTGAGCAGCGGGCCCCATCATCACCATCACCAT
SEQID NO. 223
ATGCCACCTCCTCGCCTCCTCTTCTTCCTCCTCTTCCTCACCCCCATGGAAGTCAGGCATCATCACCATCACCATCCC
GAGGAACCTCTAGTGGTGAAGGTGGAAGAGGGAGATAACGCTGTGCTGCAGTGCCTCAAGGGGACCTCAGATGGCCCC
ACTCAGCAGCTGACCTGGTCTCGGGAGTCCCCGCTTAAACCCTTCTTAAAACTCAGCCTGGGGCTGCCAGGCCTGGGA
ATCCACATGAGGCCCCTGGCCATCTGGCTTTTCATCTTCAACGTCTCTCAACAGATGGGGGGCTTCTACCTGTGCCAG
CCGGGGCCCCCCTCTGAGAAGGCCTGGCAGCCTGGCTGGACAGTCAATGTGGAGGGCAGCGGGGAGCTGTTCCGGTGG
AATGTTTCGGACCTAGGTGGCCTGGGCTGTGGCCTGAAGAACAGGTCCTCAGAGGGCCCCAGCTCCCCTTCCGGGAAG
CTCATGAGCCCCAAGCTGTATGTGTGGGCCAAAGACCGCCCTGAGATCTGGGAGGGAGAGCCTCCGTGTCTCCCACCG
AGGGACAGCCTGAACCAGAGCCTCAGCCAGGACCTCACCATGGCCCCTGGCTCCACACTCTGGCTGTCCTGTGGGGTA
CCCCCTGACTCTGTGTCCAGGGGCCCCCTCTCCTGGACCCATGTGCACCCCAAGGGGCCTAAGTCATTGCTGAGCCTA
GAGCTGAAGGACGATCGCCCGGCCAGAGATATGTGGGTAATGGAGACGGGTCTGTTGTTGCCCCGGGCCACAGCTCAA
GACGCTGGAAAGTATTATTGTCACCGTGGCAACCTGACCATGTCATTCCACCTGGAGATCACTGCTCGGCCAGGGGGA
GGTGGGTCTGGAGGTGGAGGATCTGGTGGAGGTGGGTCTGTCAGATCATCTTCTCGAACCCCGAGTGACAAGCCTGTA
GCCCATGTTGTAGCAAACCCTCAAGCTGAGGGGCAGCTCCAGTGGCTGAACCGCCGGGCCAATGCCCTCCTGGCCAAT
GGCGTGGAGCTGAGAGATAACCAGCTGGTGGTGCCATCAGAGGGCCTGTACCTCATCTACTCCCAGGTCCTCTTCAAG
GGCCAAGGCTGCCCCTCCACCCATGTGCTCCTCACCCACACCATCAGCCGCATCGCCGTCTCCTACCAGACCAAGGTC
AACCTCCTCTCTGCCATCAAGAGCCCCTGCCAGAGGGAGACCCCAGAGGGGGCTGAGGCCAAGCCCTGGTATGAGCCC
ATCTATCTGGGAGGGGTCTTCCAGCTGGAGAAGGGTGACCGACTCAGCGCTGAGATCAATCGGCCCGACTATCTCGAC
TTTGCCGAGTCTGGGCAGGTCTACTTTGGGATCATTGCCCTG
SEQID NO. 224
ATGGAGTTTGGGCTGAGCTGGGTTTTCCTCGTTGCTCTTTTTAGAGGTGTCCAGTGTGAGGTGCAGCTGGTGGAGTCT
GGTGGTGGTCTTGTTCAACCTGGTGGTTCTCTTCGTCTTTCTTGTGCTGCTTCTGGTTTTAATATTAAAGATACTTAT
ATTCATTGGGTTCGTCAAGCTCCTGGTAAAGGTCTTGAATGGGTTGCTCGTATTTATCCTACTAATGGTTATACTCGT
TATGCTGATTCTGTTAAAGGTCGTTTTACTATTTCTGCTGATACTTCTAAAAATACTGCTTATCTTCAAATGAACTCT
CTTCGTGCTGAAGATACTGCTGTTTATTATTGTTCTCGTTGGGGTGGTGATGGTTTTTATGCTATGGATTATTGGGGT
CAAGGTACTCTTGTCACCGTCTCCTCAGCTAGCACCGGGGGAGGTGGGTCTGGAGGTGGAGGATCTGGTGGAGGTGGG
TCTGACATCCAGATGACCCAGTCTCCTTCTTCTCTTTCTGCTTCTGTTGGTGATCGTGTTACTATTACTTGTCGTGCT
TCTCAAGATGTTAATACTGCTGTTGCTTGGTATCAACAAAAACCTGGTAAAGCTCCTAAACTTCTTATTTATTCTGCT
TCTTTTCTTTATTCTGGTGTTCCTTCTCGTTTTTCTGGTTCTCGTTCTGGTACTGATTTTACTCTTACTATTTCTTCT
CTTCAACCTGAAGATTTTGCTACTTATTATTGTCAACAACATTATACTACTCCTCCTACTTTTGGTCAAGGTACCAAG
GTGGAGATCAAACGTACGGACAAAACTCACACATCGCCACCGTCCCCAGCACCTGAAGCCGCGGGGGGACCGTCAGAA
GTCAGGCCCGAGGAACCTCTAGTGGTGAAGGTGGAAGAGGGAGATAACGCTGTGCTGCAGTGCCTCAAGGGGACCTCA
GATGGCCCCACTCAGCAGCTGACCTGGTCTCGGGAGTCCCCGCTTAAACCCTTCTTAAAACTCAGCCTGGGGCTGCCA
GGCCTGGGAATCCACATGAGGCCCCTGGCCATCTGGCTTTTCATCTTCAACGTCTCTCAACAGATGGGGGGCTTCTAC
CTGTGCCAGCCGGGGCCCCCCTCTGAGAAGGCCTGGCAGCCTGGCTGGACAGTCAATGTGGAGGGCAGCGGGTCTAGA
GGGCCCCATCATCACCATCACCAT
SEQID NO. 225
ATGGAGTTTGGGCTGAGCTGGGTTTTCCTCGTTGCTCTTTTTAGAGGTGTCCAGTGTGAGGTGCAGCTGGTGGAGTCT
GGTGGTGGTCTTGTTCAACCTGGTGGTTCTCTTCGTCTTTCTTGTGCTGCTTCTGGTTTTAATATTAAAGATACTTAT
ATTCATTGGGTTCGTCAAGCTCCTGGTAAAGGTCTTGAATGGGTTGCTCGTATTTATCCTACTAATGGTTATACTCGT
TATGCTGATTCTGTTAAAGGTCGTTTTACTATTTCTGCTGATACTTCTAAAAATACTGCTTATCTTCAAATGAACTCT
CTTCGTGCTGAAGATACTGCTGTTTATTATTGTTCTCGTTGGGGTGGTGATGGTTTTTATGCTATGGATTATTGGGGT
CAAGGTACTCTTGTCACCGTCTCCTCAGCTAGCACCGGGGGAGGTGGGTCTGGAGGTGGAGGATCTGGTGGAGGTGGG
TCTGACATCCAGATGACCCAGTCTCCTTCTTCTCTTTCTGCTTCTGTTGGTGATCGTGTTACTATTACTTGTCGTGCT
TCTCAAGATGTTAATACTGCTGTTGCTTGGTATCAACAAAAACCTGGTAAAGCTCCTAAACTTCTTATTTATTCTGCT
TCTTTTCTTTATTCTGGTGTTCCTTCTCGTTTTTCTGGTTCTCGTTCTGGTACTGATTTTACTCTTACTATTTCTTCT
CTTCAACCTGAAGATTTTGCTACTTATTATTGTCAACAACATTATACTACTCCTCCTACTTTTGGTCAAGGTACCAAG
GTGGAGATCAAACGTACGGACAAAACTCACACATCGCCACCGTCCCCAGCACCTGAAGCCGCGGGGGGACCGTCAGAA
GTCAGGCCCGAGGAACCTCTAGTGGTGAAGGTGGAAGAGGGAGATAACGCTGTGCTGCAGTGCCTCAAGGGGACCTCA
GATGGCCCCACTCAGCAGCTGACCTGGTCTCGGGAGTCCCCGCTTAAACCCTTCTTAAAACTCAGCCTGGGGCTGCCA
GGCCTGGGAATCCACATGAGGCCCCTGGCCATCTGGCTTTTCATCTTCAACGTCTCTCAACAGATGGGGGGCTTCTAC
CTGTGCCAGCCGGGGCCCCCCTCTGAGAAGGCCTGGCAGCCTGGCTGGACAGTCAATGTGGAGGGCAGCGGGGACAAA
ACTCACACATGCCCACCGTGCCCAGCACCTGAACTCCTGGGGGGACCGTCAGTCTTCCTCTTCCCCCCAAAACCCAAG
GACACCCTCATGATCTCCCGGACCCCTGAGGTCACATGCGTGGTGGTGGACGTGAGCCACGAAGACCCTGAGGTCAAG
TTCAACTGGTACGTGGACGGCGTGGAGGTGCATAATGCCAAGACAAAGCCGCGGGAGGAGCAGTACAACAGCACGTAC
CGTGTGGTCAGCGTCCTCACCGTCCTGCACCAGGACTGGCTGAATGGCAAGGAGTACAAGTGCAAGGTCTCCAACAAA
GCCCTCCCAGCCCCCATCGAGAAAACCATCTCCAAAGCCAAAGGGCAGCCCCGAGAACCACAGGTGTACACCCTGCCC
CCATCCCGGGAGGAGATGACCAAGAACCAGGTCAGCCTGACCTGCCTGGTCAAAGGCTTCTATCCCAGCGACATCGCC
GTGGAGTGGGAGAGCAATGGGCAGCCGGAGAACAACTACAAGACCACGCCTCCCGTGCTGGACTCCGACGGCTCCTTC
TTCCTCTACAGCAAGCTCACCGTGGACAAGAGCAGGTGGCAGCAGGGGAACGTCTTCTCATGCTCCGTGATGCACGAG
GCTCTGCACAACCACTACACGCAGAAGAGCCTCTCCCTGTCTCCGGGT
SEQID NO. 226
ATGCCACCTCCTCGCCTCCTCTTCTTCCTCCTCTTCCTCACCCCCATGGAAGTCAGGCCCGAGGAACCTCTAGTGGTG
AAGGTGGAAGAGGGAGATAACGCTGTGCTGCAGTGCCTCAAGGGGACCTCAGATGGCCCCACTCAGCAGCTGACCTGG
TCTCGGGAGTCCCCGCTTAAACCCTTCTTAAAACTCAGCCTGGGGCTGCCAGGCCTGGGAATCCACATGAGGCCCCTG
GCCATCTGGCTTTTCATCTTCAACGTCTCTCAACAGATGGGGGGCTTCTACCTGTGCCAGCCGGGGCCCCCCTCTGAG
AAGGCCTGGCAGCCTGGCTGGACAGTCAATGTGGAGGGCAGCGGGGGGGGAGGTGGGTCTGGAGGTGGAGGATCTGGT
GGAGGTGGGTCTGGTGGAGGTGGGTCTGAGGTGCAGCTGGTGGAGTCTGGTGGTGGTCTTGTTCAACCTGGTGGTTCT
CTTCGTCTTTCTTGTGCTGCTTCTGGTTTTAATATTAAAGATACTTATATTCATTGGGTTCGTCAAGCTCCTGGTAAA
GGTCTTGAATGGGTTGCTCGTATTTATCCTACTAATGGTTATACTCGTTATGCTGATTCTGTTAAAGGTCGTTTTACT
ATTTCTGCTGATACTTCTAAAAATACTGCTTATCTTCAAATGAACTCTCTTCGTGCTGAAGATACTGCTGTTTATTAT
TGTTCTCGTTGGGGTGGTGATGGTTTTTATGCTATGGATTATTGGGGTCAAGGTACTCTTGTCACCGTCTCCTCAGCT
AGCACCGGGGGAGGTGGGTCTGGAGGTGGAGGATCTGGTGGAGGTGGGTCTGACATCCAGATGACCCAGTCTCCTTCT
TCTCTTTCTGCTTCTGTTGGTGATCGTGTTACTATTACTTGTCGTGCTTCTCAAGATGTTAATACTGCTGTTGCTTGG
TATCAACAAAAACCTGGTAAAGCTCCTAAACTTCTTATTTATTCTGCTTCTTTTCTTTATTCTGGTGTTCCTTCTCGT
TTTTCTGGTTCTCGTTCTGGTACTGATTTTACTCTTACTATTTCTTCTCTTCAACCTGAAGATTTTGCTACTTATTAT
TGTCAACAACATTATACTACTCCTCCTACTTTTGGTCAAGGTACCAAGGTGGAGATCAAACGTACGTCTAGAGGGCCC
CATCATCACCATCACCAT
SEQID NO. 227
ATGCCACCTCCTCGCCTCCTCTTCTTCCTCCTCTTCCTCACCCCCATGGAAGTCAGGCCCGAGGAACCTCTAGTGGTG
AAGGTGGAAGAGGGAGATAACGCTGTGCTGCAGTGCCTCAAGGGGACCTCAGATGGCCCCACTCAGCAGCTGACCTGG
TCTCGGGAGTCCCCGCTTAAACCCTTCTTAAAACTCAGCCTGGGGCTGCCAGGCCTGGGAATCCACATGAGGCCCCTG
GCCATCTGGCTTTTCATCTTCAACGTCTCTCAACAGATGGGGGGCTTCTACCTGTGCCAGCCGGGGCCCCCCTCTGAG
AAGGCCTGGCAGCCTGGCTGGACAGTCAATGTGGAGGGCAGCGGGGGGGGAGGTGGGTCTGGAGGTGGAGGATCTGGT
GGAGGTGGGTCTGGTGGAGGTGGGTCTGAGGTGCAGCTGGTGGAGTCTGGTGGTGGTCTTGTTCAACCTGGTGGTTCT
CTTCGTCTTTCTTGTGCTGCTTCTGGTTTTAATATTAAAGATACTTATATTCATTGGGTTCGTCAAGCTCCTGGTAAA
GGTCTTGAATGGGTTGCTCGTATTTATCCTACTAATGGTTATACTCGTTATGCTGATTCTGTTAAAGGTCGTTTTACT
ATTTCTGCTGATACTTCTAAAAATACTGCTTATCTTCAAATGAACTCTCTTCGTGCTGAAGATACTGCTGTTTATTAT
TGTTCTCGTTGGGGTGGTGATGGTTTTTATGCTATGGATTATTGGGGTCAAGGTACTCTTGTCACCGTCTCCTCAGCT
AGCACCGGGGGAGGTGGGTCTGGAGGTGGAGGATCTGGTGGAGGTGGGTCTGACATCCAGATGACCCAGTCTCCTTCT
TCTCTTTCTGCTTCTGTTGGTGATCGTGTTACTATTACTTGTCGTGCTTCTCAAGATGTTAATACTGCTGTTGCTTGG
TATCAACAAAAACCTGGTAAAGCTCCTAAACTTCTTATTTATTCTGCTTCTTTTCTTTATTCTGGTGTTCCTTCTCGT
TTTTCTGGTTCTCGTTCTGGTACTGATTTTACTCTTACTATTTCTTCTCTTCAACCTGAAGATTTTGCTACTTATTAT
TGTCAACAACATTATACTACTCCTCCTACTTTTGGTCAAGGTACCAAGGTGGAGATCAAACGTACGGACAAAACTCAC
ACATGCCCACCGTGCCCAGCACCTGAACTCCTGGGGGGACCGTCAGTCTTCCTCTTCCCCCCAAAACCCAAGGACACC
CTCATGATCTCCCGGACCCCTGAGGTCACATGCGTGGTGGTGGACGTGAGCCACGAAGACCCTGAGGTCAAGTTCAAC
TGGTACGTGGACGGCGTGGAGGTGCATAATGCCAAGACAAAGCCGCGGGAGGAGCAGTACAACAGCACGTACCGTGTG
GTCAGCGTCCTCACCGTCCTGCACCAGGACTGGCTGAATGGCAAGGAGTACAAGTGCAAGGTCTCCAACAAAGCCCTC
CCAGCCCCCATCGAGAAAACCATCTCCAAAGCCAAAGGGCAGCCCCGAGAACCACAGGTGTACACCCTGCCCCCATCC
CGGGAGGAGATGACCAAGAACCAGGTCAGCCTGACCTGCCTGGTCAAAGGCTTCTATCCCAGCGACATCGCCGTGGAG
TGGGAGAGCAATGGGCAGCCGGAGAACAACTACAAGACCACGCCTCCCGTGCTGGACTCCGACGGCTCCTTCTTCCTC
TACAGCAAGCTCACCGTGGACAAGAGCAGGTGGCAGCAGGGGAACGTCTTCTCATGCTCCGTGATGCACGAGGCTCTG
CACAACCACTACACGCAGAAGAGCCTCTCCCTGTCTCCGGGT
SEQID NO. 228
ATGCCACCTCCTCGCCTCCTCTTCTTCCTCCTCTTCCTCACCCCCATGGAAGTCAGGCCCGAGGAACCTCTAGTGGTG
AAGGTGGAAGAGGGAGATAACGCTGTGCTGCAGTGCCTCAAGGGGACCTCAGATGGCCCCACTCAGCAGCTGACCTGG
TCTCGGGAGTCCCCGCTTAAACCCTTCTTAAAACTCAGCCTGGGGCTGCCAGGCCTGGGAATCCACATGAGGCCCCTG
GCCATCTGGCTTTTCATCTTCAACGTCTCTCAACAGATGGGGGGCTTCTACCTGTGCCAGCCGGGGCCCCCCTCTGAG
AAGGCCTGGCAGCCTGGCTGGACAGTCAATGTGGAGGGCAGCGGGGAGCTGTTCCGGTGGAATGTTTCGGACCTAGGT
GGCCTGGGCTGTGGCCTGAAGAACAGGTCCTCAGAGGGCCCCAGCTCCCCTTCCGGGAAGCTCATGAGCCCCAAGCTG
TATGTGTGGGCCAAAGACCGCCCTGAGATCTGGGAGGGAGAGCCTCCGTGTCTCCCACCGAGGGACAGCCTGAACCAG
AGCCTCAGCCAGGACCTCACCATGGCCCCTGGCTCCACACTCTGGCTGTCCTGTGGGGTACCCCCTGACTCTGTGTCC
AGGGGCCCCCTCTCCTGGACCCATGTGCACCCCAAGGGGCCTAAGTCATTGCTGAGCCTAGAGCTGAAGGACGATCGC
CCGGCCAGAGATATGTGGGTAATGGAGACGGGTCTGTTGTTGCCCCGGGCCACAGCTCAAGACGCTGGAAAGTATTAT
TGTCACCGTGGCAACCTGACCATGTCATTCCACCTGGAGATCACTGCTCGGCCACATCATCACCATCACCAT
SEQID NO. 229
ATGCCACCTCCTCGCCTCCTCTTCTTCCTCCTCTTCCTCACCCCCATGGAAGTCAGGCCCGAGGAACCTCTAGTGGTG
AAGGTGGAAGAGGGAGATAACGCTGTGCTGCAGTGCCTCAAGGGGACCTCAGATGGCCCCACTCAGCAGCTGACCTGG
TCTCGGGAGTCCCCGCTTAAACCCTTCTTAAAACTCAGCCTGGGGCTGCCAGGCCTGGGAATCCACATGAGGCCCCTG
GCCATCTGGCTTTTCATCTTCAACGTCTCTCAACAGATGGGGGGCTTCTACCTGTGCCAGCCGGGGCCCCCCTCTGAG
AAGGCCTGGCAGCCTGGCTGGACAGTCAATGTGGAGGGCAGCGGGGAGCTGTTCCGGTGGAATGTTTCGGACCTAGGT
GGCCTGGGCTGTGGCCTGAAGAACAGGTCCTCAGAGGGCCCCAGCTCCCCTTCCGGGAAGCTCATGAGCCCCAAGCTG
TATGTGTGGGCCAAAGACCGCCCTGAGATCTGGGAGGGAGAGCCTCCGTGTCTCCCACCGAGGGACAGCCTGAACCAG
AGCCTCAGCCAGGACCTCACCATGGCCCCTGGCTCCACACTCTGGCTGTCCTGTGGGGTACCCCCTGACTCTGTGTCC
AGGGGCCCCCTCTCCTGGACCCATGTGCACCCCAAGGGGCCTAAGTCATTGCTGAGCCTAGAGCTGAAGGACGATCGC
CCGGCCAGAGATATGTGGGTAATGGAGACGGGTCTGTTGTTGCCCCGGGCCACAGCTCAAGACGCTGGAAAGTATTAT
TGTCACCGTGGCAACCTGACCATGTCATTCCACCTGGAGATCACTGCTCGGCCAGACAAAACTCACACATGCCCACCG
TGCCCAGCACCTGAACTCCTGGGGGGACCGTCAGTCTTCCTCTTCCCCCCAAAACCCAAGGACACCCTCATGATCTCC
CGGACCCCTGAGGTCACATGCGTGGTGGTGGACGTGAGCCACGAAGACCCTGAGGTCAAGTTCAACTGGTACGTGGAC
GGCGTGGAGGTGCATAATGCCAAGACAAAGCCGCGGGAGGAGCAGTACAACAGCACGTACCGTGTGGTCAGCGTCCTC
ACCGTCCTGCACCAGGACTGGCTGAATGGCAAGGAGTACAAGTGCAAGGTCTCCAACAAAGCCCTCCCAGCCCCCATC
GAGAAAACCATCTCCAAAGCCAAAGGGCAGCCCCGAGAACCACAGGTGTACACCCTGCCCCCATCCCGGGAGGAGATG
ACCAAGAACCAGGTCAGCCTGACCTGCCTGGTCAAAGGCTTCTATCCCAGCGACATCGCCGTGGAGTGGGAGAGCAAT
GGGCAGCCGGAGAACAACTACAAGACCACGCCTCCCGTGCTGGACTCCGACGGCTCCTTCTTCCTCTACAGCAAGCTC
ACCGTGGACAAGAGCAGGTGGCAGCAGGGGAACGTCTTCTCATGCTCCGTGATGCACGAGGCTCTGCACAACCACTAC
ACGCAGAAGAGCCTCTCCCTGTCTCCGGGT
SEQID NO. 230
ATGCCACCTCCTCGCCTCCTCTTCTTCCTCCTCTTCCTCACCCCCATGGAAGTCAGGCCGAGGGACAGCCTGAACCAG
AGCCTCAGCCAGGACCTCACCATGGCCCCTGGCTCCACACTCTGGCTGTCCTGTGGGGTACCCCCTGACTCTGTGTCC
AGGGGCCCCCTCTCCTGGACCCATGTGCACCCCAAGGGGCCTAAGTCATTGCTGAGCCTAGAGCTGAAGGACGATCGC
CCGGCCAGAGATATGTGGGTAATGGAGACGGGTCTGTTGTTGCCCCGGGCCACAGCTCAAGACGCTGGAAAGTATTAT
TGTCACCGTGGCAACCTGACCATGTCATTCCACCTGGAGATCACTGCTCGGCCACATCATCACCATCACCAT
SEQID NO. 231
ATGCCACCTCCTCGCCTCCTCTTCTTCCTCCTCTTCCTCACCCCCATGGAAGTCAGGCCGAGGGACAGCCTGAACCAG
AGCCTCAGCCAGGACCTCACCATGGCCCCTGGCTCCACACTCTGGCTGTCCTGTGGGGTACCCCCTGACTCTGTGTCC
AGGGGCCCCCTCTCCTGGACCCATGTGCACCCCAAGGGGCCTAAGTCATTGCTGAGCCTAGAGCTGAAGGACGATCGC
CCGGCCAGAGATATGTGGGTAATGGAGACGGGTCTGTTGTTGCCCCGGGCCACAGCTCAAGACGCTGGAAAGTATTAT
TGTCACCGTGGCAACCTGACCATGTCATTCCACCTGGAGATCACTGCTCGGCCAGACAAAACTCACACATGCCCACCG
TGCCCAGCACCTGAACTCCTGGGGGGACCGTCAGTCTTCCTCTTCCCCCCAAAACCCAAGGACACCCTCATGATCTCC
CGGACCCCTGAGGTCACATGCGTGGTGGTGGACGTGAGCCACGAAGACCCTGAGGTCAAGTTCAACTGGTACGTGGAC
GGCGTGGAGGTGCATAATGCCAAGACAAAGCCGCGGGAGGAGCAGTACAACAGCACGTACCGTGTGGTCAGCGTCCTC
ACCGTCCTGCACCAGGACTGGCTGAATGGCAAGGAGTACAAGTGCAAGGTCTCCAACAAAGCCCTCCCAGCCCCCATC
GAGAAAACCATCTCCAAAGCCAAAGGGCAGCCCCGAGAACCACAGGTGTACACCCTGCCCCCATCCCGGGAGGAGATG
ACCAAGAACCAGGTCAGCCTGACCTGCCTGGTCAAAGGCTTCTATCCCAGCGACATCGCCGTGGAGTGGGAGAGCAAT
GGGCAGCCGGAGAACAACTACAAGACCACGCCTCCCGTGCTGGACTCCGACGGCTCCTTCTTCCTCTACAGCAAGCTC
ACCGTGGACAAGAGCAGGTGGCAGCAGGGGAACGTCTTCTCATGCTCCGTGATGCACGAGGCTCTGCACAACCACTAC
ACGCAGAAGAGCCTCTCCCTGTCTCCGGGT
SEQID NO. 232
ATGCCACCTCCTCGCCTCCTCTTCTTCCTCCTCTTCCTCACCCCCATGGAAGTCAGGCCCGAGGAACCTCTAGTGGTG
AAGGTGGAAGAGGGAGATAACGCTGTGCTGCAGTGCCTCAAGGGGACCTCAGATGGCCCCACTCAGCAGCTGACCTGG
TCTCGGGAGTCCCCGCTTAAACCCTTCTTAAAACTCAGCCTGGGGCTGCCAGGCCTGGGAATCCACATGAGGCCCCTG
GCCATCTGGCTTTTCATCTTCAACGTCTCTCAACAGATGGGGGGCTTCTACCTGTGCCAGCCGGGGCCCCCCTCTGAG
AAGGCCTGGCAGCCTGGCTGGACAGTCAATGTGGAGGGCAGCGGGGAGCTGTTCCGGTGGAATGTTTCGGACCTAGGT
GGCCTGGGCTGTGGCCTGAAGAACAGGTCCTCAGAGGGCCCCAGCTCCCCTTCCGGGAAGCTCATGAGCCCCAAGCTG
TATGTGTGGGCCAAAGACCGCCCTGAGATCTGGGAGGGAGAGCCTCCGTGTCTCCCACCGAGGGACAGCCTGAACCAG
AGCCTCAGCCAGGACCTCACCATGGCCCCTGGCTCCACACTCTGGCTGTCCTGTGGGGTACCCCCTGACTCTGTGTCC
AGGGGCCCCCTCTCCTGGACCCATGTGCACCCCAAGGGGCCTAAGTCATTGCTGAGCCTAGAGCTGAAGGACGATCGC
CCGGCCAGAGATATGTGGGTAATGGAGACGGGTCTGTTGTTGCCCCGGGCCACAGCTCAAGACGCTGGAAAGTATTAT
TGTCACCGTGGCAACCTGACCATGTCATTCCACCTGGAGATCACTGCTCGGCCAGGAGGAGGTGGGTCTGGAGGTGGA
GGATCTGGTGGAGGTGGGTCTGACATCCAGATGACCCAGTCTCCATCCTCCCTGTCTGCATCTGTAGGAGACAGAGTC
ACCATCACTTGCCAGGCGAGTCAGGACATCAGCAACTATTTAAATTGGTATCAGCAGAAACCAGGGAAAGCCCCTAAA
CTCCTGATCTACGATGCATCCAATTTGGAAACAGGGGTCCCATCAAGGTTCAGTGGAAGTGGATCTGGGACAGATTTT
ACTTTCACCATCAGCAGCCTGCAGCCTGAAGATATTGCAACATATTTCTGTCAACACTTTGATCATCTCCCGCTCGCT
TTCGGCGGAGGGACCAAGGTGGAGATCAAACGAACTGTGGCTGCACCATCTGTCTTCATCTTCCCGCCATCTGATGAG
CAGTTGAAATCTGGAACTGCCTCTGTTGTGTGCCTGCTGAATAACTTCTATCCCAGAGAGGCCAAAGTACAGTGGAAG
GTGGATAACGCCCTCCAATCGGGTAACTCCCAGGAGAGTGTCACAGAGCAGGACAGCAAGGACAGCACCTACAGCCTC
AGCAGCACCCTGACGCTGAGCAAAGCAGACTACGAGAAACACAAAGTCTACGCCTGCGAAGTCACCCATCAGGGCCTG
AGCTCGCCCGTCACAAAGAGCTTCAACAGGGGAGAGTGT
SEQID NO. 233
ATGCCACCTCCTCGCCTCCTCTTCTTCCTCCTCTTCCTCACCCCCATGGAAGTCAGGCCCGAGGAACCTCTAGTGGTG
AAGGTGGAAGAGGGAGATAACGCTGTGCTGCAGTGCCTCAAGGGGACCTCAGATGGCCCCACTCAGCAGCTGACCTGG
TCTCGGGAGTCCCCGCTTAAACCCTTCTTAAAACTCAGCCTGGGGCTGCCAGGCCTGGGAATCCACATGAGGCCCCTG
GCCATCTGGCTTTTCATCTTCAACGTCTCTCAACAGATGGGGGGCTTCTACCTGTGCCAGCCGGGGCCCCCCTCTGAG
AAGGCCTGGCAGCCTGGCTGGACAGTCAATGTGGAGGGCAGCGGGGAGCTGTTCCGGTGGAATGTTTCGGACCTAGGT
GGCCTGGGCTGTGGCCTGAAGAACAGGTCCTCAGAGGGCCCCAGCTCCCCTTCCGGGAAGCTCATGAGCCCCAAGCTG
TATGTGTGGGCCAAAGACCGCCCTGAGATCTGGGAGGGAGAGCCTCCGTGTCTCCCACCGAGGGACAGCCTGAACCAG
AGCCTCAGCCAGGACCTCACCATGGCCCCTGGCTCCACACTCTGGCTGTCCTGTGGGGTACCCCCTGACTCTGTGTCC
AGGGGCCCCCTCTCCTGGACCCATGTGCACCCCAAGGGGCCTAAGTCATTGCTGAGCCTAGAGCTGAAGGACGATCGC
CCGGCCAGAGATATGTGGGTAATGGAGACGGGTCTGTTGTTGCCCCGGGCCACAGCTCAAGACGCTGGAAAGTATTAT
TGTCACCGTGGCAACCTGACCATGTCATTCCACCTGGAGATCACTGCTCGGCCAGGAGGAGGTGGGTCTGGAGGTGGA
GGATCTGGTGGAGGTGGGTCTCAGGTGCAGCTGCAGGAGTCGGGCCCAGGACTGGTGAAGCCTTCGGAGACCCTGTCC
CTCACCTGCACTGTCTCTGGTGGCTCCGTCAGCAGTGGTGATTACTACTGGACCTGGATCCGGCAGTCCCCAGGGAAG
GGACTGGAGTGGATTGGACACATCTATTACAGTGGGAACACCAATTATAACCCCTCCCTCAAGAGTCGACTCACCATA
TCAATTGACACGTCCAAGACTCAGTTCTCCCTGAAGCTGAGTTCTGTGACCGCTGCGGACACGGCCATTTATTACTGT
GTGCGAGATCGAGTGACTGGTGCTTTTGATATCTGGGGCCAAGGGACAATGGTCACCGTCTCTTCAGCCTCCACCAAG
GGCCCATCGGTCTTCCCCCTGGCGCCCTGCTCCAGGAGCACCTCCGAGAGCACAGCGGCCCTGGGCTGCCTGGTCAAG
GACTACTTCCCTGAACCGGTGACGGTGTCGTGGAACTCAGGCGCTCTGACCAGCGGCGTGCACACCTTCCCGGCTGTC
CTACAGTCCTCAGGACTCTACTCCCTCAGCAGCGTGGTGACCGTGCCCTCCAGCAACTTCGGCACCCAGACCTACACC
TGCAACGTAGATCACAAGCCCAGCAATACCAAGGTGGACAAGACAGTTGAGCGCAAATGTTGTGTCGAGTGCCCACCG
TGCCCAGCACCACCTGTGGCAGGACCGTCAGTCTTCCTCTTCCCCCCAAAACCCAAGGACACCCTCATGATCTCCCGG
ACCCCTGAGGTCACGTGCGTGGTGGTGGACGTGAGCCACGAAGACCCCGAGGTCCAGTTCAACTGGTACGTGGACGGC
GTGGAGGTGCATAATGCCAAGACAAAGCCACGGGAGGAGCAGTTCCAAAGCACGTTCCGTGTGGTCAGCGTCCTCACC
GTCGTGCACCAGGACTGGCTGAACGGCAAGGAGTACAAGTGCAAGGTCTCCAACAAAGGCCTCCCAGCCCCCATCGAG
AAAACCATCTCCAAAACCAAAGGGCAGCCCCGAGAACCACAGGTGTACACCCTGCCCCCATCCCGGGAGGAGATGACC
AAGAACCAGGTCAGCCTGACCTGCCTGGTCAAAGGCTTCTACCCCAGCGACATCGCCGTGGAGTGGGAGAGCAATGGG
CAGCCGGAGAACAACTACAAGACCACGCCTCCCATGCTGGACTCCGACGGCTCCTTCTTCCTCTACAGCAAGCTCACC
GTGGACAAGAGCAGGTGGCAGCAGGGGAACGTCTTCTCATGCTCCGTGATGCATGAGGCTCTGCACAACCACTACACG
CAGAAGAGCCTCTCCCTGTCTCCGGGT
SEQID NO. 234
ATGGAGACAGACACACTCCTGCTATGGGTACTGCTGCTCTGGGTTCCAGGTTCCACTGGTGACATCCAGATGACCCAG
TCTCCATCCTCCCTGTCTGCATCTGTAGGAGACAGAGTCACCATCACTTGCCAGGCGAGTCAGGACATCAGCAACTAT
TTAAATTGGTATCAGCAGAAACCAGGGAAAGCCCCTAAACTCCTGATCTACGATGCATCCAATTTGGAAACAGGGGTC
CCATCAAGGTTCAGTGGAAGTGGATCTGGGACAGATTTTACTTTCACCATCAGCAGCCTGCAGCCTGAAGATATTGCA
ACATATTTCTGTCAACACTTTGATCATCTCCCGCTCGCTTTCGGCGGAGGGACCAAGGTGGAGATCAAACGAACTGTG
GCTGCACCATCTGTCTTCATCTTCCCGCCATCTGATGAGCAGTTGAAATCTGGAACTGCCTCTGTTGTGTGCCTGCTG
AATAACTTCTATCCCAGAGAGGCCAAAGTACAGTGGAAGGTGGATAACGCCCTCCAATCGGGTAACTCCCAGGAGAGT
GTCACAGAGCAGGACAGCAAGGACAGCACCTACAGCCTCAGCAGCACCCTGACGCTGAGCAAAGCAGACTACGAGAAA
CACAAAGTCTACGCCTGCGAAGTCACCCATCAGGGCCTGAGCTCGCCCGTCACAAAGAGCTTCAACAGGGGAGAGTGT
GACAAAACTCACACATCGCCACCGTCCCCAGCACCTGAAGCCGCGGGGGGACCGTCACCCGAGGAACCTCTAGTGGTG
AAGGTGGAAGAGGGAGATAACGCTGTGCTGCAGTGCCTCAAGGGGACCTCAGATGGCCCCACTCAGCAGCTGACCTGG
TCTCGGGAGTCCCCGCTTAAACCCTTCTTAAAACTCAGCCTGGGGCTGCCAGGCCTGGGAATCCACATGAGGCCCCTG
GCCATCTGGCTTTTCATCTTCAACGTCTCTCAACAGATGGGGGGCTTCTACCTGTGCCAGCCGGGGCCCCCCTCTGAG
AAGGCCTGGCAGCCTGGCTGGACAGTCAATGTGGAGGGCAGCGGGGAGCTGTTCCGGTGGAATGTTTCGGACCTAGGT
GGCCTGGGCTGTGGCCTGAAGAACAGGTCCTCAGAGGGCCCCAGCTCCCCTTCCGGGAAGCTCATGAGCCCCAAGCTG
TATGTGTGGGCCAAAGACCGCCCTGAGATCTGGGAGGGAGAGCCTCCGTGTCTCCCACCGAGGGACAGCCTGAACCAG
AGCCTCAGCCAGGACCTCACCATGGCCCCTGGCTCCACACTCTGGCTGTCCTGTGGGGTACCCCCTGACTCTGTGTCC
AGGGGCCCCCTCTCCTGGACCCATGTGCACCCCAAGGGGCCTAAGTCATTGCTGAGCCTAGAGCTGAAGGACGATCGC
CCGGCCAGAGATATGTGGGTAATGGAGACGGGTCTGTTGTTGCCCCGGGCCACAGCTCAAGACGCTGGAAAGTATTAT
TGTCACCGTGGCAACCTGACCATGTCATTCCACCTGGAGATCACTGCTCGGCCA
SEQID NO. 235
ATGGAGTTTGGGCTGAGCTGGGTTTTCCTCGTTGCTCTTTTTAGAGGTGTCCAGTGTCAGGTGCAGCTGCAGGAGTCG
GGCCCAGGACTGGTGAAGCCTTCGGAGACCCTGTCCCTCACCTGCACTGTCTCTGGTGGCTCCGTCAGCAGTGGTGAT
TACTACTGGACCTGGATCCGGCAGTCCCCAGGGAAGGGACTGGAGTGGATTGGACACATCTATTACAGTGGGAACACC
AATTATAACCCCTCCCTCAAGAGTCGACTCACCATATCAATTGACACGTCCAAGACTCAGTTCTCCCTGAAGCTGAGT
TCTGTGACCGCTGCGGACACGGCCATTTATTACTGTGTGCGAGATCGAGTGACTGGTGCTTTTGATATCTGGGGCCAA
GGGACAATGGTCACCGTCTCTTCAGCCTCCACCAAGGGCCCATCGGTCTTCCCCCTGGCGCCCTGCTCCAGGAGCACC
TCCGAGAGCACAGCGGCCCTGGGCTGCCTGGTCAAGGACTACTTCCCTGAACCGGTGACGGTGTCGTGGAACTCAGGC
GCTCTGACCAGCGGCGTGCACACCTTCCCGGCTGTCCTACAGTCCTCAGGACTCTACTCCCTCAGCAGCGTGGTGACC
GTGCCCTCCAGCAACTTCGGCACCCAGACCTACACCTGCAACGTAGATCACAAGCCCAGCAATACCAAGGTGGACAAG
ACAGTTGAGCGCAAATGTTGTGTCGAGTGCCCACCGTGCCCAGCACCACCTGTGGCAGGACCGTCAGTCTTCCTCTTC
CCCCCAAAACCCAAGGACACCCTCATGATCTCCCGGACCCCTGAGGTCACGTGCGTGGTGGTGGACGTGAGCCACGAA
GACCCCGAGGTCCAGTTCAACTGGTACGTGGACGGCGTGGAGGTGCATAATGCCAAGACAAAGCCACGGGAGGAGCAG
TTCCAAAGCACGTTCCGTGTGGTCAGCGTCCTCACCGTCGTGCACCAGGACTGGCTGAACGGCAAGGAGTACAAGTGC
AAGGTCTCCAACAAAGGCCTCCCAGCCCCCATCGAGAAAACCATCTCCAAAACCAAAGGGCAGCCCCGAGAACCACAG
GTGTACACCCTGCCCCCATCCCGGGAGGAGATGACCAAGAACCAGGTCAGCCTGACCTGCCTGGTCAAAGGCTTCTAC
CCCAGCGACATCGCCGTGGAGTGGGAGAGCAATGGGCAGCCGGAGAACAACTACAAGACCACGCCTCCCATGCTGGAC
TCCGACGGCTCCTTCTTCCTCTACAGCAAGCTCACCGTGGACAAGAGCAGGTGGCAGCAGGGGAACGTCTTCTCATGC
TCCGTGATGCATGAGGCTCTGCACAACCACTACACGCAGAAGAGCCTCTCCCTGTCTCCGGGTGGTGGAGGTGGGTCT
GGAGGTGGAGGATCTGGTGGAGGTGGGTCTCCCGAGGAACCTCTAGTGGTGAAGGTGGAAGAGGGAGATAACGCTGTG
CTGCAGTGCCTCAAGGGGACCTCAGATGGCCCCACTCAGCAGCTGACCTGGTCTCGGGAGTCCCCGCTTAAACCCTTC
TTAAAACTCAGCCTGGGGCTGCCAGGCCTGGGAATCCACATGAGGCCCCTGGCCATCTGGCTTTTCATCTTCAACGTC
TCTCAACAGATGGGGGGCTTCTACCTGTGCCAGCCGGGGCCCCCCTCTGAGAAGGCCTGGCAGCCTGGCTGGACAGTC
AATGTGGAGGGCAGCGGGGAGCTGTTCCGGTGGAATGTTTCGGACCTAGGTGGCCTGGGCTGTGGCCTGAAGAACAGG
TCCTCAGAGGGCCCCAGCTCCCCTTCCGGGAAGCTCATGAGCCCCAAGCTGTATGTGTGGGCCAAAGACCGCCCTGAG
ATCTGGGAGGGAGAGCCTCCGTGTCTCCCACCGAGGGACAGCCTGAACCAGAGCCTCAGCCAGGACCTCACCATGGCC
CCTGGCTCCACACTCTGGCTGTCCTGTGGGGTACCCCCTGACTCTGTGTCCAGGGGCCCCCTCTCCTGGACCCATGTG
CACCCCAAGGGGCCTAAGTCATTGCTGAGCCTAGAGCTGAAGGACGATCGCCCGGCCAGAGATATGTGGGTAATGGAG
ACGGGTCTGTTGTTGCCCCGGGCCACAGCTCAAGACGCTGGAAAGTATTATTGTCACCGTGGCAACCTGACCATGTCA
TTCCACCTGGAGATCACTGCTCGGCCA
SEQID NO. 236
ATGCCACCTCCTCGCCTCCTCTTCTTCCTCCTCTTCCTCACCCCCATGGAAGTCAGGCCCGAGGAACCTCTAGTGGTG
AAGGTGGAAGAGGGAGATAACGCTGTGCTGCAGTGCCTCAAGGGGACCTCAGATGGCCCCACTCAGCAGCTGACCTGG
TCTCGGGAGTCCCCGCTTAAACCCTTCTTAAAACTCAGCCTGGGGCTGCCAGGCCTGGGAATCCACATGAGGCCCCTG
GCCATCTGGCTTTTCATCTTCAACGTCTCTCAACAGATGGGGGGCTTCTACCTGTGCCAGCCGGGGCCCCCCTCTGAG
AAGGCCTGGCAGCCTGGCTGGACAGTCAATGTGGAGGGCAGCGGGGAGCTGTTCCGGTGGAATGTTTCGGACCTAGGT
GGCCTGGGCTGTGGCCTGAAGAACAGGTCCTCAGAGGGCCCCAGCTCCCCTTCCGGGAAGCTCATGAGCCCCAAGCTG
TATGTGTGGGCCAAAGACCGCCCTGAGATCTGGGAGGGAGAGCCTCCGTGTCTCCCACCGAGGGACAGCCTGAACCAG
AGCCTCAGCCAGGACCTCACCATGGCCCCTGGCTCCACACTCTGGCTGTCCTGTGGGGTACCCCCTGACTCTGTGTCC
AGGGGCCCCCTCTCCTGGACCCATGTGCACCCCAAGGGGCCTAAGTCATTGCTGAGCCTAGAGCTGAAGGACGATCGC
CCGGCCAGAGATATGTGGGTAATGGAGACGGGTCTGTTGTTGCCCCGGGCCACAGCTCAAGACGCTGGAAAGTATTAT
TGTCACCGTGGCAACCTGACCATGTCATTCCACCTGGAGATCACTGCTCGGCCAGGAGGAGGTGGGTCTGGAGGTGGA
GGATCTGGTGGAGGTGGGTCTGACATCCAGATGACCCAGTCTCCATCCTCCCTGTCTGCATCTGTAGGAGACAGAGTC
ACCATCACTTGCAGTGTCAGCTCAAGTGTATCCTCCATTTACTTGCACTGGTATCAGCAGAAACCAGGGAAAGCCCCT
AAGCTCCTGATCTATAGCACATCCAACTTGGCTTCTGGAGTCCCATCAAGGTTCAGTGGCAGTGGATCTGGGACAGAT
TTCACTCTCACCATCAGCAGTCTGCAACCTGAAGATTTTGCAACTTACTACTGTCAAGTCTACAGTGGTTACCCGCTC
ACGTTCGGCGGAGGGACCAAGGTGGAGATCAAACGAACTGTGGCTGCACCATCTGTCTTCATCTTCCCGCCATCTGAT
GAGCAGTTGAAATCTGGAACTGCCTCTGTTGTGTGCCTGCTGAATAACTTCTATCCCAGAGAGGCCAAAGTACAGTGG
AAGGTGGATAACGCCCTCCAATCGGGTAACTCCCAGGAGAGTGTCACAGAGCAGGACAGCAAGGACAGCACCTACAGC
CTCAGCAGCACCCTGACGCTGAGCAAAGCAGACTACGAGAAACACAAAGTCTACGCCTGCGAAGTCACCCATCAGGGC
CTGAGCTCGCCCGTCACAAAGAGCTTCAACAGGGGAGAGTGCT
SEQID NO. 237
ATGCCACCTCCTCGCCTCCTCTTCTTCCTCCTCTTCCTCACCCCCATGGAAGTCAGGCCCGAGGAACCTCTAGTGGTG
AAGGTGGAAGAGGGAGATAACGCTGTGCTGCAGTGCCTCAAGGGGACCTCAGATGGCCCCACTCAGCAGCTGACCTGG
TCTCGGGAGTCCCCGCTTAAACCCTTCTTAAAACTCAGCCTGGGGCTGCCAGGCCTGGGAATCCACATGAGGCCCCTG
GCCATCTGGCTTTTCATCTTCAACGTCTCTCAACAGATGGGGGGCTTCTACCTGTGCCAGCCGGGGCCCCCCTCTGAG
AAGGCCTGGCAGCCTGGCTGGACAGTCAATGTGGAGGGCAGCGGGGAGCTGTTCCGGTGGAATGTTTCGGACCTAGGT
GGCCTGGGCTGTGGCCTGAAGAACAGGTCCTCAGAGGGCCCCAGCTCCCCTTCCGGGAAGCTCATGAGCCCCAAGCTG
TATGTGTGGGCCAAAGACCGCCCTGAGATCTGGGAGGGAGAGCCTCCGTGTCTCCCACCGAGGGACAGCCTGAACCAG
AGCCTCAGCCAGGACCTCACCATGGCCCCTGGCTCCACACTCTGGCTGTCCTGTGGGGTACCCCCTGACTCTGTGTCC
AGGGGCCCCCTCTCCTGGACCCATGTGCACCCCAAGGGGCCTAAGTCATTGCTGAGCCTAGAGCTGAAGGACGATCGC
CCGGCCAGAGATATGTGGGTAATGGAGACGGGTCTGTTGTTGCCCCGGGCCACAGCTCAAGACGCTGGAAAGTATTAT
TGTCACCGTGGCAACCTGACCATGTCATTCCACCTGGAGATCACTGCTCGGCCAGGAGGAGGTGGGTCTGGAGGTGGA
GGATCTGGTGGAGGTGGGTCTCAGGTTCAGCTGGTGCAGTCTGGTGCTGAGGTGAAGAAGCCTGGTGCCTCAGTGAAG
GTCTCCTGCAAGGCTTCTGGTTACACATTCACTGACTACTACATGCACTGGGTGCGTCAGGCCCCTGGTCAAGGTCTT
GAGTGGATGGGTCGTGTTAATCCTAACCGGAGGGGTACTACCTACAACCAGAAATTCGAGGGCCGTGTCACCATGACC
ACAGACACATCCACGAGCACAGCCTACATGGAGCTGCGTAGCCTGCGTTCTGACGACACGGCCGTGTATTACTGTGCG
CGTGCGAACTGGCTTGACTACTGGGGCCAGGGCACCACCGTCACCGTCTCCTCCGCCTCCACCAAGGGCCCATCGGTC
TTCCCGCTAGCGCCCTGCTCCAGGAGCACCTCCGAGAGCACAGCCGCCCTGGGCTGCCTGGTCAAGGACTACTTCCCC
GAACCGGTGACGGTGTCGTGGAACTCAGGCGCCCTGACCAGCGGCGTGCACACCTTCCCGGCTGTCCTACAGTCCTCA
GGACTCTACTCCCTCAGCAGCGTGGTGACCGTGCCCTCCAGCAGCTTGGGCACGAAGACCTACACCTGCAACGTAGAT
CACAAGCCCAGCAACACCAAGGTGGACAAGAGAGTTGAGTCCAAATATGGTCCCCCATGCCCACCCTGCCCAGCACCT
GAGGCCGCCGGGGGACCATCAGTCTTCCTGTTCCCCCCAAAACCCAAGGACACTCTCATGATCTCCCGGACCCCTGAG
GTCACGTGCGTGGTGGTGGACGTGAGCCAGGAAGACCCCGAGGTCCAGTTCAACTGGTACGTGGATGGCGTGGAGGTG
CATAATGCCAAGACAAAGCCGCGGGAGGAGCAGTTCAACAGCACGTACCGTGTGGTCAGCGTCCTCACCGTCCTGCAC
CAGGACTGGCTGAACGGCAAGGAGTACAAGTGCAAGGTCTCCAACAAAGGCCTCCCGTCCTCCATCGAGAAAACCATC
TCCAAAGCCAAAGGGCAGCCCCGAGAGCCACAGGTGTACACCCTGCCCCCATCCCAGGAGGAGATGACCAAGAACCAG
GTCAGCCTGACCTGCCTGGTCAAAGGCTTCTACCCCAGCGACATCGCCGTGGAGTGGGAAAGCAATGGGCAGCCGGAG
AACAACTACAAGACCACGCCTCCCGTGCTGGACTCCGACGGCTCCTTCTTCCTCTACAGCAGGCTAACCGTGGACAAG
AGCAGGTGGCAGGAGGGGAATGTCTTCTCATGCTCCGTGATGCATGAGG
CTCTGCACAACCACTACACACAGAAGAGCCTCTCCCTGTCTCTG
SEQID NO. 238
ATGGAGACAGACACACTCCTGCTATGGGTACTGCTGCTCTGGGTTCCAGGTTCCACTGGTGACATCCAGATGACCCAG
TCTCCATCCTCCCTGTCTGCATCTGTAGGAGACAGAGTCACCATCACTTGCAGTGTCAGCTCAAGTGTATCCTCCATT
TACTTGCACTGGTATCAGCAGAAACCAGGGAAAGCCCCTAAGCTCCTGATCTATAGCACATCCAACTTGGCTTCTGGA
GTCCCATCAAGGTTCAGTGGCAGTGGATCTGGGACAGATTTCACTCTCACCATCAGCAGTCTGCAACCTGAAGATTTT
GCAACTTACTACTGTCAAGTCTACAGTGGTTACCCGCTCACGTTCGGCGGAGGGACCAAGGTGGAGATCAAACGAACT
GTGGCTGCACCATCTGTCTTCATCTTCCCGCCATCTGATGAGCAGTTGAAATCTGGAACTGCCTCTGTTGTGTGCCTG
CTGAATAACTTCTATCCCAGAGAGGCCAAAGTACAGTGGAAGGTGGATAACGCCCTCCAATCGGGTAACTCCCAGGAG
AGTGTCACAGAGCAGGACAGCAAGGACAGCACCTACAGCCTCAGCAGCACCCTGACGCTGAGCAAAGCAGACTACGAG
AAACACAAAGTCTACGCCTGCGAAGTCACCCATCAGGGCCTGAGCTCGCCCGTCACAAAGAGCTTCAACAGGGGAGAG
TGCGACAAAACTCACACATCGCCACCGTCCCCAGCACCTGAAGCCGCGGGGGGACCGTCACCCGAGGAACCTCTAGTG
GTGAAGGTGGAAGAGGGAGATAACGCTGTGCTGCAGTGCCTCAAGGGGACCTCAGATGGCCCCACTCAGCAGCTGACC
TGGTCTCGGGAGTCCCCGCTTAAACCCTTCTTAAAACTCAGCCTGGGGCTGCCAGGCCTGGGAATCCACATGAGGCCC
CTGGCCATCTGGCTTTTCATCTTCAACGTCTCTCAACAGATGGGGGGCTTCTACCTGTGCCAGCCGGGGCCCCCCTCT
GAGAAGGCCTGGCAGCCTGGCTGGACAGTCAATGTGGAGGGCAGCGGGGAGCTGTTCCGGTGGAATGTTTCGGACCTA
GGTGGCCTGGGCTGTGGCCTGAAGAACAGGTCCTCAGAGGGCCCCAGCTCCCCTTCCGGGAAGCTCATGAGCCCCAAG
CTGTATGTGTGGGCCAAAGACCGCCCTGAGATCTGGGAGGGAGAGCCTCCGTGTCTCCCACCGAGGGACAGCCTGAAC
CAGAGCCTCAGCCAGGACCTCACCATGGCCCCTGGCTCCACACTCTGGCTGTCCTGTGGGGTACCCCCTGACTCTGTG
TCCAGGGGCCCCCTCTCCTGGACCCATGTGCACCCCAAGGGGCCTAAGTCATTGCTGAGCCTAGAGCTGAAGGACGAT
CGCCCGGCCAGAGATATGTGGGTAATGGAGACGGGTCTGTTGTTGCCCCGGGCCACAGCTCAAGACGCTGGAAAGTAT
TATTGTCACCGTGGCAACCTGACCATGTCATTCCACCTGGAGATCACTGCTCGGCCA
SEQID NO. 239
ATGGAGTTTGGGCTGAGCTGGGTTTTCCTCGTTGCTCTTTTTAGAGGTGTCCAGTGTCAGGTTCAGCTGGTGCAGTCT
GGTGCTGAGGTGAAGAAGCCTGGTGCCTCAGTGAAGGTCTCCTGCAAGGCTTCTGGTTACACATTCACTGACTACTAC
ATGCACTGGGTGCGTCAGGCCCCTGGTCAAGGTCTTGAGTGGATGGGTCGTGTTAATCCTAACCGGAGGGGTACTACC
TACAACCAGAAATTCGAGGGCCGTGTCACCATGACCACAGACACATCCACGAGCACAGCCTACATGGAGCTGCGTAGC
CTGCGTTCTGACGACACGGCCGTGTATTACTGTGCGCGTGCGAACTGGCTTGACTACTGGGGCCAGGGCACCACCGTC
ACCGTCTCCTCCGCCTCCACCAAGGGCCCATCGGTCTTCCCGCTAGCGCCCTGCTCCAGGAGCACCTCCGAGAGCACA
GCCGCCCTGGGCTGCCTGGTCAAGGACTACTTCCCCGAACCGGTGACGGTGTCGTGGAACTCAGGCGCCCTGACCAGC
GGCGTGCACACCTTCCCGGCTGTCCTACAGTCCTCAGGACTCTACTCCCTCAGCAGCGTGGTGACCGTGCCCTCCAGC
AGCTTGGGCACGAAGACCTACACCTGCAACGTAGATCACAAGCCCAGCAACACCAAGGTGGACAAGAGAGTTGAGTCC
AAATATGGTCCCCCATGCCCACCCTGCCCAGCACCTGAGGCCGCCGGGGGACCATCAGTCTTCCTGTTCCCCCCAAAA
CCCAAGGACACTCTCATGATCTCCCGGACCCCTGAGGTCACGTGCGTGGTGGTGGACGTGAGCCAGGAAGACCCCGAG
GTCCAGTTCAACTGGTACGTGGATGGCGTGGAGGTGCATAATGCCAAGACAAAGCCGCGGGAGGAGCAGTTCAACAGC
ACGTACCGTGTGGTCAGCGTCCTCACCGTCCTGCACCAGGACTGGCTGAACGGCAAGGAGTACAAGTGCAAGGTCTCC
AACAAAGGCCTCCCGTCCTCCATCGAGAAAACCATCTCCAAAGCCAAAGGGCAGCCCCGAGAGCCACAGGTGTACACC
CTGCCCCCATCCCAGGAGGAGATGACCAAGAACCAGGTCAGCCTGACCTGCCTGGTCAAAGGCTTCTACCCCAGCGAC
ATCGCCGTGGAGTGGGAAAGCAATGGGCAGCCGGAGAACAACTACAAGACCACGCCTCCCGTGCTGGACTCCGACGGC
TCCTTCTTCCTCTACAGCAGGCTAACCGTGGACAAGAGCAGGTGGCAGGAGGGGAATGTCTTCTCATGCTCCGTGATG
CATGAGGCTCTGCACAACCACTACACACAGAAGAGCCTCTCCCTGTCTCTGGGTGGTGGAGGTGGGTCTGGAGGTGGA
GGATCTGGTGGAGGTGGGTCTCCCGAGGAACCTCTAGTGGTGAAGGTGGAAGAGGGAGATAACGCTGTGCTGCAGTGC
CTCAAGGGGACCTCAGATGGCCCCACTCAGCAGCTGACCTGGTCTCGGGAGTCCCCGCTTAAACCCTTCTTAAAACTC
AGCCTGGGGCTGCCAGGCCTGGGAATCCACATGAGGCCCCTGGCCATCTGGCTTTTCATCTTCAACGTCTCTCAACAG
ATGGGGGGCTTCTACCTGTGCCAGCCGGGGCCCCCCTCTGAGAAGGCCTGGCAGCCTGGCTGGACAGTCAATGTGGAG
GGCAGCGGGGAGCTGTTCCGGTGGAATGTTTCGGACCTAGGTGGCCTGGGCTGTGGCCTGAAGAACAGGTCCTCAGAG
GGCCCCAGCTCCCCTTCCGGGAAGCTCATGAGCCCCAAGCTGTATGTGTGGGCCAAAGACCGCCCTGAGATCTGGGAG
GGAGAGCCTCCGTGTCTCCCACCGAGGGACAGCCTGAACCAGAGCCTCAGCCAGGACCTCACCATGGCCCCTGGCTCC
ACACTCTGGCTGTCCTGTGGGGTACCCCCTGACTCTGTGTCCAGGGGCCCCCTCTCCTGGACCCATGTGCACCCCAAG
GGGCCTAAGTCATTGCTGAGCCTAGAGCTGAAGGACGATCGCCCGGCCAGAGATATGTGGGTAATGGAGACGGGTCTG
TTGTTGCCCCGGGCCACAGCTCAAGACGCTGGAAAGTATTATTGTCACCGTGGCAACCTGACCATGTCATTCCACCTG
GAGATCACTGCTCGGCCA
SEQID NO. 240
ATGGAGTTTGGGCTGAGCTGGGTTTTCCTCGTTGCTCTTTTTAGAGGTGTCCAGTGTGAGGTGCAGCTGGTGGAGTCT
GGTGGTGGTCTTGTTCAACCTGGTGGTTCTCTTCGTCTTTCTTGTGCTGCTTCTGGTTTTAATATTAAAGATACTTAT
ATTCATTGGGTTCGTCAAGCTCCTGGTAAAGGTCTTGAATGGGTTGCTCGTATTTATCCTACTAATGGTTATACTCGT
TATGCTGATTCTGTTAAAGGTCGTTTTACTATTTCTGCTGATACTTCTAAAAATACTGCTTATCTTCAAATGAACTCT
CTTCGTGCTGAAGATACTGCTGTTTATTATTGTTCTCGTTGGGGTGGTGATGGTTTTTATGCTATGGATTATTGGGGT
CAAGGTACTCTTGTCACCGTCTCCTCAGCTAGCACCGGGGGAGGTGGGTCTGGAGGTGGAGGATCTGGTGGAGGTGGG
TCTGACATCCAGATGACCCAGTCTCCTTCTTCTCTTTCTGCTTCTGTTGGTGATCGTGTTACTATTACTTGTCGTGCT
TCTCAAGATGTTAATACTGCTGTTGCTTGGTATCAACAAAAACCTGGTAAAGCTCCTAAACTTCTTATTTATTCTGCT
TCTTTTCTTTATTCTGGTGTTCCTTCTCGTTTTTCTGGTTCTCGTTCTGGTACTGATTTTACTCTTACTATTTCTTCT
CTTCAACCTGAAGATTTTGCTACTTATTATTGTCAACAACATTATACTACTCCTCCTACTTTTGGTCAAGGTACCAAG
GTGGAGATCAAACGTACGGACAAAACTCACACATCGCCACCGTCCCCAGCACCTGAAGCCGCGGGGGGACCGTCACCC
GAGGAACCTCTAGTGGTGAAGGTGGAAGAGGGAGATAACGCTGTGCTGCAGTGCCTCAAGGGGACCTCAGATGGCCCC
ACTCAGCAGCTGACCTGGTCTCGGGAGTCCCCGCTTAAACCCTTCTTAAAACTCAGCCTGGGGCTGCCAGGCCTGGGA
ATCCACATGAGGCCCCTGGCCATCTGGCTTTTCATCTTCAACGTCTCTCAACAGATGGGGGGCTTCTACCTGTGCCAG
CCGGGGCCCCCCTCTGAGAAGGCCTGGCAGCCTGGCTGGACAGTCAATGTGGAGGGCAGCGGGGAGCTGTTCCGGTGG
AATGTTTCGGACCTAGGTGGCCTGGGCTGTGGCCTGAAGAACAGGTCCTCAGAGGGCCCCAGCTCCCCTTCCGGGAAG
CTCATGAGCCCCAAGCTGTATGTGTGGGCCAAAGACCGCCCTGAGATCTGGGAGGGAGAGCCTCCGTGTCTCCCACCG
AGGGACAGCCTGAACCAGAGCCTCAGCCAGGACCTCACCATGGCCCCTGGCTCCACACTCTGGCTGTCCTGTGGGGTA
CCCCCTGACTCTGTGTCCAGGGGCCCCCTCTCCTGGACCCATGTGCACCCCAAGGGGCCTAAGTCATTGCTGAGCCTA
GAGCTGAAGGACGATCGCCCGGCCAGAGATATGTGGGTAATGGAGACGGGTCTGTTGTTGCCCCGGGCCACAGCTCAA
GACGCTGGAAAGTATTATTGTCACCGTGGCAACCTGACCATGTCATTCCACCTGGAGATCACTGCTCGGCCATCTAGA
GGGCCCCATCATCACCATCACCAT
SEQID NO. 241
ATGGAGTTTGGGCTGAGCTGGGTTTTCCTCGTTGCTCTTTTTAGAGGTGTCCAGTGTGAGGTGCAGCTGGTGGAGTCT
GGTGGTGGTCTTGTTCAACCTGGTGGTTCTCTTCGTCTTTCTTGTGCTGCTTCTGGTTTTAATATTAAAGATACTTAT
ATTCATTGGGTTCGTCAAGCTCCTGGTAAAGGTCTTGAATGGGTTGCTCGTATTTATCCTACTAATGGTTATACTCGT
TATGCTGATTCTGTTAAAGGTCGTTTTACTATTTCTGCTGATACTTCTAAAAATACTGCTTATCTTCAAATGAACTCT
CTTCGTGCTGAAGATACTGCTGTTTATTATTGTTCTCGTTGGGGTGGTGATGGTTTTTATGCTATGGATTATTGGGGT
CAAGGTACTCTTGTCACCGTCTCCTCAGCTAGCACCGGGGGAGGTGGGTCTGGAGGTGGAGGATCTGGTGGAGGTGGG
TCTGACATCCAGATGACCCAGTCTCCTTCTTCTCTTTCTGCTTCTGTTGGTGATCGTGTTACTATTACTTGTCGTGCT
TCTCAAGATGTTAATACTGCTGTTGCTTGGTATCAACAAAAACCTGGTAAAGCTCCTAAACTTCTTATTTATTCTGCT
TCTTTTCTTTATTCTGGTGTTCCTTCTCGTTTTTCTGGTTCTCGTTCTGGTACTGATTTTACTCTTACTATTTCTTCT
CTTCAACCTGAAGATTTTGCTACTTATTATTGTCAACAACATTATACTACTCCTCCTACTTTTGGTCAAGGTACCAAG
GTGGAGATCAAACGTACGGACAAAACTCACACATCGCCACCGTCCCCAGCACCTGAAGCCGCGGGGGGACCGTCACCC
GAGGAACCTCTAGTGGTGAAGGTGGAAGAGGGAGATAACGCTGTGCTGCAGTGCCTCAAGGGGACCTCAGATGGCCCC
ACTCAGCAGCTGACCTGGTCTCGGGAGTCCCCGCTTAAACCCTTCTTAAAACTCAGCCTGGGGCTGCCAGGCCTGGGA
ATCCACATGAGGCCCCTGGCCATCTGGCTTTTCATCTTCAACGTCTCTCAACAGATGGGGGGCTTCTACCTGTGCCAG
CCGGGGCCCCCCTCTGAGAAGGCCTGGCAGCCTGGCTGGACAGTCAATGTGGAGGGCAGCGGGGAGCTGTTCCGGTGG
AATGTTTCGGACCTAGGTGGCCTGGGCTGTGGCCTGAAGAACAGGTCCTCAGAGGGCCCCAGCTCCCCTTCCGGGAAG
CTCATGAGCCCCAAGCTGTATGTGTGGGCCAAAGACCGCCCTGAGATCTGGGAGGGAGAGCCTCCGTGTCTCCCACCG
AGGGACAGCCTGAACCAGAGCCTCAGCCAGGACCTCACCATGGCCCCTGGCTCCACACTCTGGCTGTCCTGTGGGGTA
CCCCCTGACTCTGTGTCCAGGGGCCCCCTCTCCTGGACCCATGTGCACCCCAAGGGGCCTAAGTCATTGCTGAGCCTA
GAGCTGAAGGACGATCGCCCGGCCAGAGATATGTGGGTAATGGAGACGGGTCTGTTGTTGCCCCGGGCCACAGCTCAA
GACGCTGGAAAGTATTATTGTCACCGTGGCAACCTGACCATGTCATTCCACCTGGAGATCACTGCTCGGCCAGACAAA
ACTCACACATGCCCACCGTGCCCAGCACCTGAACTCCTGGGGGGACCGTCAGTCTTCCTCTTCCCCCCAAAACCCAAG
GACACCCTCATGATCTCCCGGACCCCTGAGGTCACATGCGTGGTGGTGGACGTGAGCCACGAAGACCCTGAGGTCAAG
TTCAACTGGTACGTGGACGGCGTGGAGGTGCATAATGCCAAGACAAAGCCGCGGGAGGAGCAGTACAACAGCACGTAC
CGTGTGGTCAGCGTCCTCACCGTCCTGCACCAGGACTGGCTGAATGGCAAGGAGTACAAGTGCAAGGTCTCCAACAAA
GCCCTCCCAGCCCCCATCGAGAAAACCATCTCCAAAGCCAAAGGGCAGCCCCGAGAACCACAGGTGTACACCCTGCCC
CCATCCCGGGAGGAGATGACCAAGAACCAGGTCAGCCTGACCTGCCTGGTCAAAGGCTTCTATCCCAGCGACATCGCC
GTGGAGTGGGAGAGCAATGGGCAGCCGGAGAACAACTACAAGACCACGCCTCCCGTGCTGGACTCCGACGGCTCCTTC
TTCCTCTACAGCAAGCTCACCGTGGACAAGAGCAGGTGGCAGCAGGGGAACGTCTTCTCATGCTCCGTGATGCACGAG
GCTCTGCACAACCACTACACGCAGAAGAGCCTCTCCCTGTCTCCGGGT
SEQID NO. 242
ATGCCACCTCCTCGCCTCCTCTTCTTCCTCCTCTTCCTCACCCCCATGGAAGTCAGGCCCGAGGAACCTCTAGTGGTG
AAGGTGGAAGAGGGAGATAACGCTGTGCTGCAGTGCCTCAAGGGGACCTCAGATGGCCCCACTCAGCAGCTGACCTGG
TCTCGGGAGTCCCCGCTTAAACCCTTCTTAAAACTCAGCCTGGGGCTGCCAGGCCTGGGAATCCACATGAGGCCCCTG
GCCATCTGGCTTTTCATCTTCAACGTCTCTCAACAGATGGGGGGCTTCTACCTGTGCCAGCCGGGGCCCCCCTCTGAG
AAGGCCTGGCAGCCTGGCTGGACAGTCAATGTGGAGGGCAGCGGGGAGCTGTTCCGGTGGAATGTTTCGGACCTAGGT
GGCCTGGGCTGTGGCCTGAAGAACAGGTCCTCAGAGGGCCCCAGCTCCCCTTCCGGGAAGCTCATGAGCCCCAAGCTG
TATGTGTGGGCCAAAGACCGCCCTGAGATCTGGGAGGGAGAGCCTCCGTGTCTCCCACCGAGGGACAGCCTGAACCAG
AGCCTCAGCCAGGACCTCACCATGGCCCCTGGCTCCACACTCTGGCTGTCCTGTGGGGTACCCCCTGACTCTGTGTCC
AGGGGCCCCCTCTCCTGGACCCATGTGCACCCCAAGGGGCCTAAGTCATTGCTGAGCCTAGAGCTGAAGGACGATCGC
CCGGCCAGAGATATGTGGGTAATGGAGACGGGTCTGTTGTTGCCCCGGGCCACAGCTCAAGACGCTGGAAAGTATTAT
TGTCACCGTGGCAACCTGACCATGTCATTCCACCTGGAGATCACTGCTCGGCCAGGGGGAGGTGGGTCTGGAGGTGGA
GGATCTGGTGGAGGTGGGTCTGGTGGAGGTGGGTCTGAGGTGCAGCTGGTGGAGTCTGGTGGTGGTCTTGTTCAACCT
GGTGGTTCTCTTCGTCTTTCTTGTGCTGCTTCTGGTTTTAATATTAAAGATACTTATATTCATTGGGTTCGTCAAGCT
CCTGGTAAAGGTCTTGAATGGGTTGCTCGTATTTATCCTACTAATGGTTATACTCGTTATGCTGATTCTGTTAAAGGT
CGTTTTACTATTTCTGCTGATACTTCTAAAAATACTGCTTATCTTCAAATGAACTCTCTTCGTGCTGAAGATACTGCT
GTTTATTATTGTTCTCGTTGGGGTGGTGATGGTTTTTATGCTATGGATTATTGGGGTCAAGGTACTCTTGTCACCGTC
TCCTCAGCTAGCACCGGGGGAGGTGGGTCTGGAGGTGGAGGATCTGGTGGAGGTGGGTCTGACATCCAGATGACCCAG
TCTCCTTCTTCTCTTTCTGCTTCTGTTGGTGATCGTGTTACTATTACTTGTCGTGCTTCTCAAGATGTTAATACTGCT
GTTGCTTGGTATCAACAAAAACCTGGTAAAGCTCCTAAACTTCTTATTTATTCTGCTTCTTTTCTTTATTCTGGTGTT
CCTTCTCGTTTTTCTGGTTCTCGTTCTGGTACTGATTTTACTCTTACTATTTCTTCTCTTCAACCTGAAGATTTTGCT
ACTTATTATTGTCAACAACATTATACTACTCCTCCTACTTTTGGTCAAGGTACCAAGGTGGAGATCAAACGTACGTCT
AGAGGGCCCCATCATCACCATCACCAT
SEQID NO. 243
ATGCCACCTCCTCGCCTCCTCTTCTTCCTCCTCTTCCTCACCCCCATGGAAGTCAGGCCCGAGGAACCTCTAGTGGTG
AAGGTGGAAGAGGGAGATAACGCTGTGCTGCAGTGCCTCAAGGGGACCTCAGATGGCCCCACTCAGCAGCTGACCTGG
TCTCGGGAGTCCCCGCTTAAACCCTTCTTAAAACTCAGCCTGGGGCTGCCAGGCCTGGGAATCCACATGAGGCCCCTG
GCCATCTGGCTTTTCATCTTCAACGTCTCTCAACAGATGGGGGGCTTCTACCTGTGCCAGCCGGGGCCCCCCTCTGAG
AAGGCCTGGCAGCCTGGCTGGACAGTCAATGTGGAGGGCAGCGGGGAGCTGTTCCGGTGGAATGTTTCGGACCTAGGT
GGCCTGGGCTGTGGCCTGAAGAACAGGTCCTCAGAGGGCCCCAGCTCCCCTTCCGGGAAGCTCATGAGCCCCAAGCTG
TATGTGTGGGCCAAAGACCGCCCTGAGATCTGGGAGGGAGAGCCTCCGTGTCTCCCACCGAGGGACAGCCTGAACCAG
AGCCTCAGCCAGGACCTCACCATGGCCCCTGGCTCCACACTCTGGCTGTCCTGTGGGGTACCCCCTGACTCTGTGTCC
AGGGGCCCCCTCTCCTGGACCCATGTGCACCCCAAGGGGCCTAAGTCATTGCTGAGCCTAGAGCTGAAGGACGATCGC
CCGGCCAGAGATATGTGGGTAATGGAGACGGGTCTGTTGTTGCCCCGGGCCACAGCTCAAGACGCTGGAAAGTATTAT
TGTCACCGTGGCAACCTGACCATGTCATTCCACCTGGAGATCACTGCTCGGCCAGGGGGAGGTGGGTCTGGAGGTGGA
GGATCTGGTGGAGGTGGGTCTGGTGGAGGTGGGTCTGAGGTGCAGCTGGTGGAGTCTGGTGGTGGTCTTGTTCAACCT
GGTGGTTCTCTTCGTCTTTCTTGTGCTGCTTCTGGTTTTAATATTAAAGATACTTATATTCATTGGGTTCGTCAAGCT
CCTGGTAAAGGTCTTGAATGGGTTGCTCGTATTTATCCTACTAATGGTTATACTCGTTATGCTGATTCTGTTAAAGGT
CGTTTTACTATTTCTGCTGATACTTCTAAAAATACTGCTTATCTTCAAATGAACTCTCTTCGTGCTGAAGATACTGCT
GTTTATTATTGTTCTCGTTGGGGTGGTGATGGTTTTTATGCTATGGATTATTGGGGTCAAGGTACTCTTGTCACCGTC
TCCTCAGCTAGCACCGGGGGAGGTGGGTCTGGAGGTGGAGGATCTGGTGGAGGTGGGTCTGACATCCAGATGACCCAG
TCTCCTTCTTCTCTTTCTGCTTCTGTTGGTGATCGTGTTACTATTACTTGTCGTGCTTCTCAAGATGTTAATACTGCT
GTTGCTTGGTATCAACAAAAACCTGGTAAAGCTCCTAAACTTCTTATTTATTCTGCTTCTTTTCTTTATTCTGGTGTT
CCTTCTCGTTTTTCTGGTTCTCGTTCTGGTACTGATTTTACTCTTACTATTTCTTCTCTTCAACCTGAAGATTTTGCT
ACTTATTATTGTCAACAACATTATACTACTCCTCCTACTTTTGGTCAAGGTACCAAGGTGGAGATCAAACGTACGGAC
AAAACTCACACATGCCCACCGTGCCCAGCACCTGAACTCCTGGGGGGACCGTCAGTCTTCCTCTTCCCCCCAAAACCC
AAGGACACCCTCATGATCTCCCGGACCCCTGAGGTCACATGCGTGGTGGTGGACGTGAGCCACGAAGACCCTGAGGTC
AAGTTCAACTGGTACGTGGACGGCGTGGAGGTGCATAATGCCAAGACAAAGCCGCGGGAGGAGCAGTACAACAGCACG
TACCGTGTGGTCAGCGTCCTCACCGTCCTGCACCAGGACTGGCTGAATGGCAAGGAGTACAAGTGCAAGGTCTCCAAC
AAAGCCCTCCCAGCCCCCATCGAGAAAACCATCTCCAAAGCCAAAGGGCAGCCCCGAGAACCACAGGTGTACACCCTG
CCCCCATCCCGGGAGGAGATGACCAAGAACCAGGTCAGCCTGACCTGCCTGGTCAAAGGCTTCTATCCCAGCGACATC
GCCGTGGAGTGGGAGAGCAATGGGCAGCCGGAGAACAACTACAAGACCACGCCTCCCGTGCTGGACTCCGACGGCTCC
TTCTTCCTCTACAGCAAGCTCACCGTGGACAAGAGCAGGTGGCAGCAGGGGAACGTCTTCTCATGCTCCGTGATGCAC
GAGGCTCTGCACAACCACTACACGCAGAAGAGCCTCTCCCTGTCTCCGGGT
SEQID NO. 246
AAGCTTAATTTAAGGCAGGATGTCTCAGAGTCTGGGAAAATCCCACTTTCCTCCTGCTACACCTTACAGTTGTGAGAA
AGCACATTTCAGACAACAGGGAAAACCCATACTTCACCACAACAACACACTATACATTGTCTGGTCCACTGGAGCATA
AATTAAAGAGAAACAATGTAGTCAAGCAAGTAGGCGGCAAGAGGAAGGGGGCGGAGACATCATCAGGGAGTATAAACT
CTGAGATGCCTCAGAGCCTCACAGACTCAACAAGAGCTCCAGCAAAGACTTTCACTGTAGCTTGACTTGACCTGAGAT
TAACTAGGGAATCTTGAGAATAAAGAAGCTTAACTAGTTAGCGGACCGACGCGTACGCGGCCGCTCGAGATGGAGAGC
GACGAGAGCGGCCTGCCCGCCATGGAGATCGAGTGCCGCATCACCGGCACCCTGAACGGCGTGGAGTTCGAGCTGGTG
GGCGGCGGAGAGGGCACCCCCGAGCAGGGCCGCATGACCAACAAGATGAAGAGCACCAAAGGCGCCCTGACCTTCAGC
CCCTACCTGCTGAGCCACGTGATGGGCTACGGCTTCTACCACTTCGGCACCTACCCCAGCGGCTACGAGAACCCCTTC
CTGCACGCCATCAACAACGGCGGCTACACCAACACCCGCATCGAGAAGTACGAGGACGGCGGCGTGCTGCACGTGAGC
TTCAGCTACCGCTACGAGGCCGGCCGCGTGATCGGCGACTTCAAGGTGATGGGCACCGGCTTCCCCGAGGACAGCGTG
ATCTTCACCGACAAGATCATCCGCAGCAACGCCACCGTGGAGCACCTGCACCCCATGGGCGATAACGATCTGGATGGC
AGCTTCACCCGCACCTTCAGCCTGCGCGACGGCGGCTACTACAGCTCCGTGGTGGACAGCCACATGCACTTCAAGAGC
GCCATCCACCCCAGCATCCTGCAGAACGGGGGCCCCATGTTCGCCTTCCGCCGCGTGGAGGAGGATCACAGCAACACC
GAGCTGGGCATCGTGGAGTACCAGCACGCCTTCAAGACCCCGGATGCAGATGCCGGTGAAGAAAGAGTT
SEQID NO. 247
AAGCTTTAACGAAGACAGGGCCATGTAGAGGGCCCCAGGGAGTGAAAGGGCCTCCAGGACCTCCAGGTATGGAATACA
GGGGACGTTTAAGAAGATATGGCCACACACTGGGGCCCTGAGAAGTGAGAGCTTCATGAAAAAAATCAGGGACCCCAG
AGTTCCTTGGAAGCCAAGACTGAAACCAGCATTATGAGTCTCCGGGTCAGAATGAAAGAAGAAGGCCTGCCCCAGTGG
GGTCTGTGAATTCCCGGGGGTGATTTCACTCCCCGGGGCTGTCCCAGGCTTGTCCCTGCTACCCCCACCCAGCCTTTC
CTGAGGCCTCAAGCCTGCCACCAAGCCCCCAGCTCCTTCTCCCCGCAGGGACCCAAACACAGGCCTCGGGACTCAACA
CAGCTTTTCCCTCCAACCCCGTTTTCTCTCCCTCAAGGACTCAGCTTTCTGAGGCCCCTCCCAGTTCTAGTTCTATCT
TTTTCCTGCATCCTGTCTGGAAGTTAGAAGGAAACAGACCACAGACCTGGTCCCCAAAAGAAATGGAGGCAATAGGTT
TTGAGGGGCATGGGGACGGGGTTCAGCCTCCAGGGTCCTACACACAAATCAGTCAGTGGCCCAGAAGACCCCCTCGGA
ATCGGAGCAGGGAGGATGGGGAGTGTGAGGGGTATCCTTGATGCTTGTGTGTCCCCAACTTTCCAAATCCCCGCCCCC
GCGATGGAGAAGAAACCGAGACAGAAGGTGCAGGGCCCACTACCGCTTCCTCCAGATGAGCTCATGGGTTTCTCCACC
AAGGAAGTTTTCCGCTGGTTGAATGATTCTTTCCCCGCCCTCCTCTCGCCCCAGGGACATATAAAGGCAGTTGTTGGC
ACACCCAGCCAGCAGACGCTCCCTCAGCAAGGACAGCAGAGGACCAGCTAAGAGGGAGAGAAGCAACTACAGACCCCC
CCTGAAAACAACCCTCAGACGCCACATCCCCTGACAAGCTGCCAGGCAGGTTCTCTTCCTCTCACATACTGACCCACG
GCTCCACCCTCTCTCCCCTGGAAAGGACACAAGCTTAACTAGTTAGCGGACCGACGCGTACGCGGCCGCTCGAGATGG
AGAGCGACGAGAGCGGCCTGCCCGCCATGGAGATCGAGTGCCGCATCACCGGCACCCTGAACGGCGTGGAGTTCGAGC
TGGTGGGCGGCGGAGAGGGCACCCCCGAGCAGGGCCGCATGACCAACAAGATGAAGAGCACCAAAGGCGCCCTGACCT
TCAGCCCCTACCTGCTGAGCCACGTGATGGGCTACGGCTTCTACCACTTCGGCACCTACCCCAGCGGCTACGAGAACC
CCTTCCTGCACGCCATCAACAACGGCGGCTACACCAACACCCGCATCGAGAAGTACGAGGACGGCGGCGTGCTGCACG
TGAGCTTCAGCTACCGCTACGAGGCCGGCCGCGTGATCGGCGACTTCAAGGTGATGGGCACCGGCTTCCCCGAGGACA
GCGTGATCTTCACCGACAAGATCATCCGCAGCAACGCCACCGTGGAGCACCTGCACCCCATGGGCGATAACGATCTGG
ATGGCAGCTTCACCCGCACCTTCAGCCTGCGCGACGGCGGCTACTACAGCTCCGTGGTGGACAGCCACATGCACTTCA
AGAGCGCCATCCACCCCAGCATCCTGCAGAACGGGGGCCCCATGTTCGCCTTCCGCCGCGTGGAGGAGGATCACAGCA
ACACCGAGCTGGGCATCGTGGAGTACCAGCACGCCTTCAAGACCCCGGATGCAGATGCCGGTGAAGAAAGAGTT
SEQID NO. 248
AAGCTTGGGAGAAGCTAGACTTAAAATCTTCCATTGCAGCTGTAAACACATCTGGACAATAGTCTGTTTTCTGCATTT
GTGAATCCCACACCCATGGAACTATGAATCGTGCATCAGAGTTATTTAAAACCACCGTGCATGGAGTGAACCAATACC
GAGGTGTTTGCTTATCATTTTCCTTTGAGCACACAGCACAGCCTTGAACTCAGTGACACTCCTAAGAGGGCTCTAGGG
TCAGGCCAACTTAGATGAGATGCTAGTCTTTAGCTAAAGATGCCCTTCCACCCCCGTTGCACGACCTTGCTTCTCAGT
CTTTGTTGAGTCTTCTGGGGGAGAATCCCCCTAGAGGACTCAGTTTACAAAACCCTAAGTGAGACCACTGCCAAGAAG
TGCTTGCTCACCCCTCCTGCCGCGGCAGGGAATCCCCCTTTCCTTGTACAGGCAAAACACAAAAAAGGACTCATAAGT
GAAGCCTGATCCTTCTCACCAAACACTGCCCACACCTCCTAGTAATTGAACTTGAAAAAAAAAACTGGTTTGAAAAAT
TACCGCAAACCATATTGTCATAAAAAAAAAAAAAAACACTTCCTATATGAGATCACAGAACAGAGTAGGCACAAGTTC
CTGCTGAGCAGATCAGCCTAATGCTTAAATAGAACAACTCCTGGCTGTCATTGACATTGTCTAAAAGCCAAGATGACA
GACTGAGAGGCCTGAGCCCTTGTTCTGGCATTCTCCCAGGAAGATGCAGTAAAGGGGTTGACCCAATATACAAGCTTA
ACTAGTTAGCGGACCGACGCGTACGCGGCCGCTCGAGATGGAGAGCGACGAGAGCGGCCTGCCCGCCATGGAGATCGA
GTGCCGCATCACCGGCACCCTGAACGGCGTGGAGTTCGAGCTGGTGGGCGGCGGAGAGGGCACCCCCGAGCAGGGCCG
CATGACCAACAAGATGAAGAGCACCAAAGGCGCCCTGACCTTCAGCCCCTACCTGCTGAGCCACGTGATGGGCTACGG
CTTCTACCACTTCGGCACCTACCCCAGCGGCTACGAGAACCCCTTCCTGCACGCCATCAACAACGGCGGCTACACCAA
CACCCGCATCGAGAAGTACGAGGACGGCGGCGTGCTGCACGTGAGCTTCAGCTACCGCTACGAGGCCGGCCGCGTGAT
CGGCGACTTCAAGGTGATGGGCACCGGCTTCCCCGAGGACAGCGTGATCTTCACCGACAAGATCATCCGCAGCAACGC
CACCGTGGAGCACCTGCACCCCATGGGCGATAACGATCTGGATGGCAGCTTCACCCGCACCTTCAGCCTGCGCGACGG
CGGCTACTACAGCTCCGTGGTGGACAGCCACATGCACTTCAAGAGCGCCATCCACCCCAGCATCCTGCAGAACGGGGG
CCCCATGTTCGCCTTCCGCCGCGTGGAGGAGGATCACAGCAACACCGAGCTGGGCATCGTGGAGTACCAGCACGCCTT
CAAGACCCCGGATGCAGATGCCGGTGAAGAAAGAGTT
SEQID NO. 249
AAGCTTGATATCGAATTAGGAGGAAAACTGTTTCATACAGAAGGCGTCAATTAGGAGGAAAAACTGTTTCATACAGAA
GGCGTCAATTAGGAGGAAAAACTGTTTCATACAGAAGGCGTCAATTGGTCCCATCGAATTAGGAGGAAAAACTGTTTC
ATACAGAAGGCGTCAATTAGGAGGAAAAACTGTTTCATACAGAAGGCGTCAATTAGGAGGAAAAACTGTTTCATACAG
AAGGCGTCAATTGGTCCCGGGACATTTTGACACCCCCATAATATTTTTCCAGAATTAACAGTATAAATTGCATCTCTT
GTTCAAGAGTTCCCTATCACTCTCTTTAATCACTACTCACAGTAACCTCAACTCCTGAAGCTTAACTAGTTAGCGGAC
CGACGCGTACGCGGCCGCTCGAGATGGAGAGCGACGAGAGCGGCCTGCCCGCCATGGAGATCGAGTGCCGCATCACCG
GCACCCTGAACGGCGTGGAGTTCGAGCTGGTGGGCGGCGGAGAGGGCACCCCCGAGCAGGGCCGCATGACCAACAAGA
TGAAGAGCACCAAAGGCGCCCTGACCTTCAGCCCCTACCTGCTGAGCCACGTGATGGGCTACGGCTTCTACCACTTCG
GCACCTACCCCAGCGGCTACGAGAACCCCTTCCTGCACGCCATCAACAACGGCGGCTACACCAACACCCGCATCGAGA
AGTACGAGGACGGCGGCGTGCTGCACGTGAGCTTCAGCTACCGCTACGAGGCCGGCCGCGTGATCGGCGACTTCAAGG
TGATGGGCACCGGCTTCCCCGAGGACAGCGTGATCTTCACCGACAAGATCATCCGCAGCAACGCCACCGTGGAGCACC
TGCACCCCATGGGCGATAACGATCTGGATGGCAGCTTCACCCGCACCTTCAGCCTGCGCGACGGCGGCTACTACAGCT
CCGTGGTGGACAGCCACATGCACTTCAAGAGCGCCATCCACCCCAGCATCCTGCAGAACGGGGGCCCCATGTTCGCCT
TCCGCCGCGTGGAGGAGGATCACAGCAACACCGAGCTGGGCATCGTGGAGTACCAGCACGCCTTCAAGACCCCGGATG
CAGATGCCGGTGAAGAAAGAGTT
SEQID NO. 250
ATGCCACCTCCTCGCCTCCTCTTCTTCCTCCTCTTCCTCACCCCCATGGAAGTCAGGCCCGAGGAACCTCTAGTGGTG
AAGGTGGAAGAGGGAGATAACGCTGTGCTGCAGTGCCTCAAGGGGACCTCAGATGGCCCCACTCAGCAGCTGACCTGG
TCTCGGGAGTCCCCGCTTAAACCCTTCTTAAAACTCAGCCTGGGGCTGCCAGGCCTGGGAATCCACATGAGGCCCCTG
GCCATCTGGCTTTTCATCTTCAACGTCTCTCAACAGATGGGGGGCTTCTACCTGTGCCAGCCGGGGCCCCCCTCTGAG
AAGGCCTGGCAGCCTGGCTGGACAGTCAATGTGGAGGGCAGCGGGGAGCTGTTCCGGTGGAATGTTTCGGACCTAGGT
GGCCTGGGCTGTGGCCTGAAGAACAGGTCCTCAGAGGGCCCCAGCTCCCCTTCCGGGAAGCTCATGAGCCCCAAGCTG
TATGTGTGGGCCAAAGACCGCCCTGAGATCTGGGAGGGAGAGCCTCCGTGTCTCCCACCGAGGGACAGCCTGAACCAG
AGCCTCAGCCAGGACCTCACCATGGCCCCTGGCTCCACACTCTGGCTGTCCTGTGGGGTACCCCCTGACTCTGTGTCC
AGGGGCCCCCTCTCCTGGACCCATGTGCACCCCAAGGGGCCTAAGTCATTGCTGAGCCTAGAGCTGAAGGACGATCGC
CCGGCCAGAGATATGTGGGTAATGGAGACGGGTCTGTTGTTGCCCCGGGCCACAGCTCAAGACGCTGGAAAGTATTAT
TGTCACCGTGGCAACCTGACCATGTCATTCCACCTGGAGATCACTGCTCGGCCAGTACTATGGCACTGGCTGCTGAGG
ACTGGTGGCTGGAAGGGAGGAGGTGGGTCTGGAGGTGGAGGATCTGGTGGAGGTGGGTCTGGAGGAGGTGGGTCTCAG
GTGCAGCTGCAGGAGTCGGGCCCAGGACTGGTGAAGCCTTCGGAGACCCTGTCCCTCACCTGCACTGTCTCTGGTGGC
TCCGTCAGCAGTGGTGATTACTACTGGACCTGGATCCGGCAGTCCCCAGGGAAGGGACTGGAGTGGATTGGACACATC
TATTACAGTGGGAACACCAATTATAACCCCTCCCTCAAGAGTCGACTCACCATATCAATTGACACGTCCAAGACTCAG
TTCTCCCTGAAGCTGAGTTCTGTGACCGCTGCGGACACGGCCATTTATTACTGTGTGCGAGATCGAGTGACTGGTGCT
TTTGATATCTGGGGCCAAGGGACAATGGTCACCGTCTCTTCAGCCTCCACCAAGGGCCCATCGGTCTTCCCCCTGGCG
CCCTGCTCCAGGAGCACCTCCGAGAGCACAGCGGCCCTGGGCTGCCTGGTCAAGGACTACTTCCCTGAACCGGTGACG
GTGTCGTGGAACTCAGGCGCTCTGACCAGCGGCGTGCACACCTTCCCGGCTGTCCTACAGTCCTCAGGACTCTACTCC
CTCAGCAGCGTGGTGACCGTGCCCTCCAGCAACTTCGGCACCCAGACCTACACCTGCAACGTAGATCACAAGCCCAGC
AATACCAAGGTGGACAAGACAGTTGAGCGCAAATGTTGTGTCGAGTGCCCACCGTGCCCAGCACCACCTGTGGCAGGA
CCGTCAGTCTTCCTCTTCCCCCCAAAACCCAAGGACACCCTCATGATCTCCCGGACCCCTGAGGTCACGTGCGTGGTG
GTGGACGTGAGCCACGAAGACCCCGAGGTCCAGTTCAACTGGTACGTGGACGGCGTGGAGGTGCATAATGCCAAGACA
AAGCCACGGGAGGAGCAGTTCCAAAGCACGTTCCGTGTGGTCAGCGTCCTCACCGTCGTGCACCAGGACTGGCTGAAC
GGCAAGGAGTACAAGTGCAAGGTCTCCAACAAAGGCCTCCCAGCCCCCATCGAGAAAACCATCTCCAAAACCAAAGGG
CAGCCCCGAGAACCACAGGTGTACACCCTGCCCCCATCCCGGGAGGAGATGACCAAGAACCAGGTCAGCCTGACCTGC
CTGGTCAAAGGCTTCTACCCCAGCGACATCGCCGTGGAGTGGGAGAGCAATGGGCAGCCGGAGAACAACTACAAGACC
ACGCCTCCCATGCTGGACTCCGACGGCTCCTTCTTCCTCTACAGCAAGCTCACCGTGGACAAGAGCAGGTGGCAGCAG
GGGAACGTCTTCTCATGCTCCGTGATGCATGAGGCTCTGCACAACCACTACACGCAGAAGAGCCTCTCCCTGTCTCCG
GGT
SEQID NO. 251
ATGCCACCTCCTCGCCTCCTCTTCTTCCTCCTCTTCCTCACCCCCATGGAAGTCAGGCCCGAGGAACCTCTAGTGGTG
AAGGTGGAAGAGGGAGATAACGCTGTGCTGCAGTGCCTCAAGGGGACCTCAGATGGCCCCACTCAGCAGCTGACCTGG
TCTCGGGAGTCCCCGCTTAAACCCTTCTTAAAACTCAGCCTGGGGCTGCCAGGCCTGGGAATCCACATGAGGCCCCTG
GCCATCTGGCTTTTCATCTTCAACGTCTCTCAACAGATGGGGGGCTTCTACCTGTGCCAGCCGGGGCCCCCCTCTGAG
AAGGCCTGGCAGCCTGGCTGGACAGTCAATGTGGAGGGCAGCGGGGAGCTGTTCCGGTGGAATGTTTCGGACCTAGGT
GGCCTGGGCTGTGGCCTGAAGAACAGGTCCTCAGAGGGCCCCAGCTCCCCTTCCGGGAAGCTCATGAGCCCCAAGCTG
TATGTGTGGGCCAAAGACCGCCCTGAGATCTGGGAGGGAGAGCCTCCGTGTCTCCCACCGAGGGACAGCCTGAACCAG
AGCCTCAGCCAGGACCTCACCATGGCCCCTGGCTCCACACTCTGGCTGTCCTGTGGGGTACCCCCTGACTCTGTGTCC
AGGGGCCCCCTCTCCTGGACCCATGTGCACCCCAAGGGGCCTAAGTCATTGCTGAGCCTAGAGCTGAAGGACGATCGC
CCGGCCAGAGATATGTGGGTAATGGAGACGGGTCTGTTGTTGCCCCGGGCCACAGCTCAAGACGCTGGAAAGTATTAT
TGTCACCGTGGCAACCTGACCATGTCATTCCACCTGGAGATCACTGCTCGGCCAGTACTATGGCACTGGCTGCTGAGG
ACTGGTGGCTGGAAGGGAGGAGGTGGGTCTGGAGGAGGTGGGTCTGGAGGTGGAGGATCTGGTGGAGGTGGGTCTCAG
GTTCAGCTGGTGCAGTCTGGTGCTGAGGTGAAGAAGCCTGGTGCCTCAGTGAAGGTCTCCTGCAAGGCTTCTGGTTAC
ACATTCACTGACTACTACATGCACTGGGTGCGTCAGGCCCCTGGTCAAGGTCTTGAGTGGATGGGTCGTGTTAATCCT
AACCGGAGGGGTACTACCTACAACCAGAAATTCGAGGGCCGTGTCACCATGACCACAGACACATCCACGAGCACAGCC
TACATGGAGCTGCGTAGCCTGCGTTCTGACGACACGGCCGTGTATTACTGTGCGCGTGCGAACTGGCTTGACTACTGG
GGCCAGGGCACCACCGTCACCGTCTCCTCCGCCTCCACCAAGGGCCCATCGGTCTTCCCGCTAGCGCCCTGCTCCAGG
AGCACCTCCGAGAGCACAGCCGCCCTGGGCTGCCTGGTCAAGGACTACTTCCCCGAACCGGTGACGGTGTCGTGGAAC
TCAGGCGCCCTGACCAGCGGCGTGCACACCTTCCCGGCTGTCCTACAGTCCTCAGGACTCTACTCCCTCAGCAGCGTG
GTGACCGTGCCCTCCAGCAGCTTGGGCACGAAGACCTACACCTGCAACGTAGATCACAAGCCCAGCAACACCAAGGTG
GACAAGAGAGTTGAGTCCAAATATGGTCCCCCATGCCCACCCTGCCCAGCACCTGAGGCCGCCGGGGGACCATCAGTC
TTCCTGTTCCCCCCAAAACCCAAGGACACTCTCATGATCTCCCGGACCCCTGAGGTCACGTGCGTGGTGGTGGACGTG
AGCCAGGAAGACCCCGAGGTCCAGTTCAACTGGTACGTGGATGGCGTGGAGGTGCATAATGCCAAGACAAAGCCGCGG
GAGGAGCAGTTCAACAGCACGTACCGTGTGGTCAGCGTCCTCACCGTCCTGCACCAGGACTGGCTGAACGGCAAGGAG
TACAAGTGCAAGGTCTCCAACAAAGGCCTCCCGTCCTCCATCGAGAAAACCATCTCCAAAGCCAAAGGGCAGCCCCGA
GAGCCACAGGTGTACACCCTGCCCCCATCCCAGGAGGAGATGACCAAGAACCAGGTCAGCCTGACCTGCCTGGTCAAA
GGCTTCTACCCCAGCGACATCGCCGTGGAGTGGGAAAGCAATGGGCAGCCGGAGAACAACTACAAGACCACGCCTCCC
GTGCTGGACTCCGACGGCTCCTTCTTCCTCTACAGCAGGCTAACCGTGGACAAGAGCAGGTGGCAGGAGGGGAATGTC
TTCTCATGCTCCGTGATGCATGAGGCTCTGCACAACCACTACACACAGAAGAGCCTCTCCCTGTCTCTG
SEQEDNO. 252
ATGCCACCTCCTCGCCTCCTCTTCTTCCTCCTCTTCCTCACCCCCATGGAAGTCAGGCCCGAGGAACCTCTAGTGGTG
AAGGTGGAAGAGGGAGATAACGCTGTGCTGCAGTGCCTCAAGGGGACCTCAGATGGCCCCACTCAGCAGCTGACCTGG
TCTCGGGAGTCCCCGCTTAAACCCTTCTTAAAACTCAGCCTGGGGCTGCCAGGCCTGGGAATCCACATGAGGCCCCTG
GCCATCTGGCTTTTCATCTTCAACGTCTCTCAACAGATGGGGGGCTTCTACCTGTGCCAGCCGGGGCCCCCCTCTGAG
AAGGCCTGGCAGCCTGGCTGGACAGTCAATGTGGAGGGCAGCGGGGAGCTGTTCCGGTGGAATGTTTCGGACCTAGGT
GGCCTGGGCTGTGGCCTGAAGAACAGGTCCTCAGAGGGCCCCAGCTCCCCTTCCGGGAAGCTCATGAGCCCCAAGCTG
TATGTGTGGGCCAAAGACCGCCCTGAGATCTGGGAGGGAGAGCCTCCGTGTCTCCCACCGAGGGACAGCCTGAACCAG
AGCCTCAGCCAGGACCTCACCATGGCCCCTGGCTCCACACTCTGGCTGTCCTGTGGGGTACCCCCTGACTCTGTGTCC
AGGGGCCCCCTCTCCTGGACCCATGTGCACCCCAAGGGGCCTAAGTCATTGCTGAGCCTAGAGCTGAAGGACGATCGC
CCGGCCAGAGATATGTGGGTAATGGAGACGGGTCTGTTGTTGCCCCGGGCCACAGCTCAAGACGCTGGAAAGTATTAT
TGTCACCGTGGCAACCTGACCATGTCATTCCACCTGGAGATCACTGCTCGGCCAGTACTATGGCACTGGCTGCTGAGG
ACTGGTGGCTGGAAGGGAGGAGGTGGGTCTGGAGGTGGAGGATCTGGTGGAGGTGGGTCTGGAGGAGGTGGGTCTCAG
GTGCAGCTGGTGCAGAGCGGCGCCGAGGACAAGAAGCCCGGCGAGAGCGTGAAGATCAGCTGCAAGGCCAGCGGCTAC
ACCTTCACCAACTACGGCATGAACTGGGTGAGGCAGGCCCCCGGCCAGGGCCTGAAGTGGATGGGCTGGATCAACACC
TACACCGGCGAGAGCACCTACGCCGACGACTTCAAGGGCAGGTTCGCCTTCAGCCTGGACACCAGCGCCAGCACCGCC
TACCTGCAGCTGAGCAGCCTGAGGGGCGAGGACACCGCCGTGTACTTCTGCGCCAGGTTCGCCATCAAGGGCGACTAC
TGGGGCCAGGGCACCACCGTGACCGTGAGCAGCGCCAGCACCGGCGGCGGCGGCAGCGGCGGCGGCGGCAGCGGCGGC
GGCGGCAGCGGCGGCGGCGGCAGCGACATCGTGATGACCCAGAGCCCCCTGAGCCTGGAGGTGAGCCCCGGCGAGCCC
GCCAGCATCAGCTGCAGGAGCACCAAGAGCCTGCTGCACAGCGACGGCATCACCTACCTGTACTGGTACCTGCAGAAG
CCCGGCCAGAGCCCCCAGCTGCTGATCTACCAGCTGAGCAACCTGGCCAGCGGCGTGCCCGACAGGTTCAGCAGCAGC
GGCAGCGGCACCGACTTCACCCTGAAGATCAGCAGGGTGGAGGCCGAGGACGAGGGCACCTACTACTGCGCCCAGAAC
CTGGAGATCCCCAGGACCTTCGGCCAGGGCACCAAGCTGGAGATCAAGAGGACCCATCATCACCATCACCAT
SEQID NO. 253
ATGCCACCTCCTCGCCTCCTCTTCTTCCTCCTCTTCCTCACCCCCATGGAAGTCAGGCCCGAGGAACCTCTAGTGGTG
AAGGTGGAAGAGGGAGATAACGCTGTGCTGCAGTGCCTCAAGGGGACCTCAGATGGCCCCACTCAGCAGCTGACCTGG
TCTCGGGAGTCCCCGCTTAAACCCTTCTTAAAACTCAGCCTGGGGCTGCCAGGCCTGGGAATCCACATGAGGCCCCTG
GCCATCTGGCTTTTCATCTTCAACGTCTCTCAACAGATGGGGGGCTTCTACCTGTGCCAGCCGGGGCCCCCCTCTGAG
AAGGCCTGGCAGCCTGGCTGGACAGTCAATGTGGAGGGCAGCGGGGAGCTGTTCCGGTGGAATGTTTCGGACCTAGGT
GGCCTGGGCTGTGGCCTGAAGAACAGGTCCTCAGAGGGCCCCAGCTCCCCTTCCGGGAAGCTCATGAGCCCCAAGCTG
TATGTGTGGGCCAAAGACCGCCCTGAGATCTGGGAGGGAGAGCCTCCGTGTCTCCCACCGAGGGACAGCCTGAACCAG
AGCCTCAGCCAGGACCTCACCATGGCCCCTGGCTCCACACTCTGGCTGTCCTGTGGGGTACCCCCTGACTCTGTGTCC
AGGGGCCCCCTCTCCTGGACCCATGTGCACCCCAAGGGGCCTAAGTCATTGCTGAGCCTAGAGCTGAAGGACGATCGC
CCGGCCAGAGATATGTGGGTAATGGAGACGGGTCTGTTGTTGCCCCGGGCCACAGCTCAAGACGCTGGAAAGTATTAT
TGTCACCGTGGCAACCTGACCATGTCATTCCACCTGGAGATCACTGCTCGGCCAGTACTATGGCACTGGCTGCTGAGG
ACTGGTGGCTGGAAGGGAGGAGGTGGGTCTGGAGGTGGAGGATCTGGTGGAGGTGGGTCTGGAGGAGGTGGGTCTCAG
GTTCAGCTGGTGCAGTCTGGTGCTGAGGATGTGAAGCCTGATGCCTCAGTGAAGCTCTCCTGCAAGGCTTCTGGTTAC
ACATTCACTGACTACTACATGCACTGGGTGCGTCAGGCCCCTGGTCAAGGTCTTGAGTGGATGGGTCGTGTTAATCCT
AACCGGAGGGGTACTACCTACAACCAGAAATTCGAGGGCCGTGTCACCATGACCACAGACACATCCACGAGCACAGCC
TACATGCAGCTGAGTAGCCTGCGTGGTGAAGACACGGCCGTGTATTACTGTGCGCGTGCGAACTGGCTTGACTACTGG
GGCCAGGGCACCACCGTCACCGTCTCCTCCGCCTCCACCGGGGGAGGTGGGTCTGGAGGTGGAGGATCTGGTGGAGGT
GGGTCTGGTGGAGGTGGGTCTGACATCCAGATGACCCAGTCTCCATCCTCCCTGGAGGCATCTGTAGGAGACAGAGTC
ACCATCACTTGCAGTGTCAGCTCAAGTGTATCCTCCATTTACTTGCACTGGTATCAGCAGAAACCAGGGAAAAGCCCT
AAGCTCCTGATCTATAGCACATCCAACTTGGCTTCTGGAGTCCCAGATAGGTTCAGTGGCAGTGGATCTGGGACAGAT
TTCACTCTCACCATCAGCAGTCTGCAAGCCGAAGATGAGGGCACTTACTACTGTCAAGTCTACAGTGGTTACCCGCTC
ACGTTCGGCGGAGGGACCAAGCTGGAGATCAAACGAACTCATCATCACCATCACCAT
SEQEDNO. 254
ATGCCACCTCCTCGCCTCCTCTTCTTCCTCCTCTTCCTCACCCCCATGGAAGTCAGGCCCGAGGAACCTCTAGTGGTG
AAGGTGGAAGAGGGAGATAACGCTGTGCTGCAGTGCCTCAAGGGGACCTCAGATGGCCCCACTCAGCAGCTGACCTGG
TCTCGGGAGTCCCCGCTTAAACCCTTCTTAAAACTCAGCCTGGGGCTGCCAGGCCTGGGAATCCACATGAGGCCCCTG
GCCATCTGGCTTTTCATCTTCAACGTCTCTCAACAGATGGGGGGCTTCTACCTGTGCCAGCCGGGGCCCCCCTCTGAG
AAGGCCTGGCAGCCTGGCTGGACAGTCAATGTGGAGGGCAGCGGGGAGCTGTTCCGGTGGAATGTTTCGGACCTAGGT
GGCCTGGGCTGTGGCCTGAAGAACAGGTCCTCAGAGGGCCCCAGCTCCCCTTCCGGGAAGCTCATGAGCCCCAAGCTG
TATGTGTGGGCCAAAGACCGCCCTGAGATCTGGGAGGGAGAGCCTCCGTGTCTCCCACCGAGGGACAGCCTGAACCAG
AGCCTCAGCCAGGACCTCACCATGGCCCCTGGCTCCACACTCTGGCTGTCCTGTGGGGTACCCCCTGACTCTGTGTCC
AGGGGCCCCCTCTCCTGGACCCATGTGCACCCCAAGGGGCCTAAGTCATTGCTGAGCCTAGAGCTGAAGGACGATCGC
CCGGCCAGAGATATGTGGGTAATGGAGACGGGTCTGTTGTTGCCCCGGGCCACAGCTCAAGACGCTGGAAAGTATTAT
TGTCACCGTGGCAACCTGACCATGTCATTCCACCTGGAGATCACTGCTCGGCCAGTACTATGGCACTGGCTGCTGAGG
ACTGGTGGCTGGAAGGGAGGAGGTGGGTCTGGAGGTGGAGGATCTGGTGGAGGTGGGTCTGGAGGAGGTGGGTCTCAG
GTGCAGCTGCAGGAGAGCGGCCCCGGCGACGTGAAGCCCAGCGAGACCCTGAGCCTGACCTGCACCGTGAGCGGCGGC
AGCGTGAGCAGCGGCGACTACTACTGGACCTGGATCAGGCAGAGCCCCGGCAAGGGCCTGGAGTGGATCGGCCACATC
TACTACAGCGGCAACACCAACTACAACCCCAGCCTGAAGAGCAGGCTGACCATCAGCATCGACACCAGCAAGACCACC
TTCAGCCTGCAGCTGAGCAGCGTGACCGGCGAGGACACCGCCATCTACTACTGCGTGAGGGACAGGGTGACCGGCGCC
TTCGACATCTGGGGCCAGGGCACCACCGTGACCGTGAGCAGCGCCAGCACCGGCGGCGGCGGCAGCGGCGGCGGCGGC
AGCGGCGGCGGCGGCAGCGGCGGCGGCGGCAGCGACATCCAGATGACCCAGAGCCCCAGCAGCCTGGAGGCCAGCGTG
GGCGACAGGGTGACCATCACCTGCCAGGCCAGCCAGGACATCAGCAACTACCTGAACTGGTACCAGCAGAAGCCCGGC
AAGAGCCCCAAGCTGCTGATCTACGACGCCAGCAACCTGGAGACCGGCGTGCCCGACAGGTTCAGCGGCAGCGGCAGC
GGCACCGACTTCACCTTCACCATCAGCAGCCTGCAGGCCGAGGACGAGGGCACCTACTTCTGCCAGCACTTCGACCAC
CTGCCCCTGGCCTTCGGCGGCGGCACCAAGCTGGAGATCAAGAGGACCCATCATCACCATCACCAT
SEQID NO. 255
ATGCCACCTCCTCGCCTCCTCTTCTTCCTCCTCTTCCTCACCCCCATGGAAGTCAGGCCCGAGGAACCTCTAGTGGTG
AAGGTGGAAGAGGGAGATAACGCTGTGCTGCAGTGCCTCAAGGGGACCTCAGATGGCCCCACTCAGCAGCTGACCTGG
TCTCGGGAGTCCCCGCTTAAACCCTTCTTAAAACTCAGCCTGGGGCTGCCAGGCCTGGGAATCCACATGAGGCCCCTG
GCCATCTGGCTTTTCATCTTCAACGTCTCTCAACAGATGGGGGGCTTCTACCTGTGCCAGCCGGGGCCCCCCTCTGAG
AAGGCCTGGCAGCCTGGCTGGACAGTCAATGTGGAGGGCAGCGGGGAGCTGTTCCGGTGGAATGTTTCGGACCTAGGT
GGCCTGGGCTGTGGCCTGAAGAACAGGTCCTCAGAGGGCCCCAGCTCCCCTTCCGGGAAGCTCATGAGCCCCAAGCTG
TATGTGTGGGCCAAAGACCGCCCTGAGATCTGGGAGGGAGAGCCTCCGTGTCTCCCACCGAGGGACAGCCTGAACCAG
AGCCTCAGCCAGGACCTCACCATGGCCCCTGGCTCCACACTCTGGCTGTCCTGTGGGGTACCCCCTGACTCTGTGTCC
AGGGGCCCCCTCTCCTGGACCCATGTGCACCCCAAGGGGCCTAAGTCATTGCTGAGCCTAGAGCTGAAGGACGATCGC
CCGGCCAGAGATATGTGGGTAATGGAGACGGGTCTGTTGTTGCCCCGGGCCACAGCTCAAGACGCTGGAAAGTATTAT
TGTCACCGTGGCAACCTGACCATGTCATTCCACCTGGAGATCACTGCTCGGCCAGTACTATGGCACTGGCTGCTGAGG
ACTGGTGGCTGGAAGGGGGGAGGTGGGTCTGGAGGTGGAGGATCTGGTGGAGGTGGGTCTGGTGGAGGTGGGTCTGAG
GTGCAGCTGGTGGAGTCTGGTGGTGGTCTTGTTCAACCTGGTGGTTCTCTTCGTCTTTCTTGTGCTGCTTCTGGTTTT
AATATTAAAGATACTTATATTCATTGGGTTCGTCAAGCTCCTGGTAAAGGTCTTGAATGGGTTGCTCGTATTTATCCT
ACTAATGGTTATACTCGTTATGCTGATTCTGTTAAAGGTCGTTTTACTATTTCTGCTGATACTTCTAAAAATACTGCT
TATCTTCAAATGAACTCTCTTCGTGCTGAAGATACTGCTGTTTATTATTGTTCTCGTTGGGGTGGTGATGGTTTTTAT
GCTATGGATTATTGGGGTCAAGGTACTCTTGTCACCGTCTCCTCAGCTAGCACCGGGGGAGGTGGGTCTGGAGGTGGA
GGATCTGGTGGAGGTGGGTCTGACATCCAGATGACCCAGTCTCCTTCTTCTCTTTCTGCTTCTGTTGGTGATCGTGTT
ACTATTACTTGTCGTGCTTCTCAAGATGTTAATACTGCTGTTGCTTGGTATCAACAAAAACCTGGTAAAGCTCCTAAA
CTTCTTATTTATTCTGCTTCTTTTCTTTATTCTGGTGTTCCTTCTCGTTTTTCTGGTTCTCGTTCTGGTACTGATTTT
ACTCTTACTATTTCTTCTCTTCAACCTGAAGATTTTGCTACTTATTATTGTCAACAACATTATACTACTCCTCCTACT
TTTGGTCAAGGTACCAAGGTGGAGATCAAACGTACGCATCATCACCATCACCAT
SEQID NO. 256
ATGCCACCTCCTCGCCTCCTCTTCTTCCTCCTCTTCCTCACCCCCATGGAAGTCAGGCCCGAGGAACCTCTAGTGGTG
AAGGTGGAAGAGGGAGATAACGCTGTGCTGCAGTGCCTCAAGGGGACCTCAGATGGCCCCACTCAGCAGCTGACCTGG
TCTCGGGAGTCCCCGCTTAAACCCTTCTTAAAACTCAGCCTGGGGCTGCCAGGCCTGGGAATCCACATGAGGCCCCTG
GCCATCTGGCTTTTCATCTTCAACGTCTCTCAACAGATGGGGGGCTTCTACCTGTGCCAGCCGGGGCCCCCCTCTGAG
AAGGCCTGGCAGCCTGGCTGGACAGTCAATGTGGAGGGCAGCGGGGAGCTGTTCCGGTGGAATGTTTCGGACCTAGGT
GGCCTGGGCTGTGGCCTGAAGAACAGGTCCTCAGAGGGCCCCAGCTCCCCTTCCGGGAAGCTCATGAGCCCCAAGCTG
TATGTGTGGGCCAAAGACCGCCCTGAGATCTGGGAGGGAGAGCCTCCGTGTCTCCCACCGAGGGACAGCCTGAACCAG
AGCCTCAGCCAGGACCTCACCATGGCCCCTGGCTCCACACTCTGGCTGTCCTGTGGGGTACCCCCTGACTCTGTGTCC
AGGGGCCCCCTCTCCTGGACCCATGTGCACCCCAAGGGGCCTAAGTCATTGCTGAGCCTAGAGCTGAAGGACGATCGC
CCGGCCAGAGATATGTGGGTAATGGAGACGGGTCTGTTGTTGCCCCGGGCCACAGCTCAAGACGCTGGAAAGTATTAT
TGTCACCGTGGCAACCTGACCATGTCATTCCACCTGGAGATCACTGCTCGGCCAGTACTATGGCACTGGCTGCTGAGG
ACTGGTGGCTGGAAGGACAAAACTCACACATGCCCACCGTGCCCAGCACCTGAACTCCTGGGGGGACCGTCAGTCTTC
CTCTTCCCCCCAAAACCCAAGGACACCCTCATGATCTCCCGGACCCCTGAGGTCACATGCGTGGTGGTGGACGTGAGC
CACGAAGACCCTGAGGTCAAGTTCAACTGGTACGTGGACGGCGTGGAGGTGCATAATGCCAAGACAAAGCCGCGGGAG
GAGCAGTACAACAGCACGTACCGTGTGGTCAGCGTCCTCACCGTCCTGCACCAGGACTGGCTGAATGGCAAGGAGTAC
AAGTGCAAGGTCTCCAACAAAGCCCTCCCAGCCCCCATCGAGAAAACCATCTCCAAAGCCAAAGGGCAGCCCCGAGAA
CCACAGGTGTACACCCTGCCCCCATCCCGGGAGGAGATGACCAAGAACCAGGTCAGCCTGACCTGCCTGGTCAAAGGC
TTCTATCCCAGCGACATCGCCGTGGAGTGGGAGAGCAATGGGCAGCCGGAGAACAACTACAAGACCACGCCTCCCGTG
CTGGACTCCGACGGCTCCTTCTTCCTCTACAGCAAGCTCACCGTGGACAAGAGCAGGTGGCAGCAGGGGAACGTCTTC
TCATGCTCCGTGATGCACGAGGCTCTGCACAACCACTACACGCAGAAGAGCCTCTCCCTGTCTCCGGGTGGAGGAGGT
GGGTCTGGAGGTGGAGGATCTGGTGGAGGTGGGTCTGGAGGAGGTGGGTCTGAGGTGCAGCTGGTGGAGTCTGGTGGT
GGTCTTGTTCAACCTGGTGGTTCTCTTCGTCTTTCTTGTGCTGCTTCTGGTTTTAATATTAAAGATACTTATATTCAT
TGGGTTCGTCAAGCTCCTGGTAAAGGTCTTGAATGGGTTGCTCGTATTTATCCTACTAATGGTTATACTCGTTATGCT
GATTCTGTTAAAGGTCGTTTTACTATTTCTGCTGATACTTCTAAAAATACTGCTTATCTTCAAATGAACTCTCTTCGT
GCTGAAGATACTGCTGTTTATTATTGTTCTCGTTGGGGTGGTGATGGTTTTTATGCTATGGATTATTGGGGTCAAGGT
ACTCTTGTCACCGTCTCCTCAGCTAGCACCGGGGGAGGTGGGTCTGGAGGTGGAGGATCTGGTGGAGGTGGGTCTGAC
ATCCAGATGACCCAGTCTCCTTCTTCTCTTTCTGCTTCTGTTGGTGATCGTGTTACTATTACTTGTCGTGCTTCTCAA
GATGTTAATACTGCTGTTGCTTGGTATCAACAAAAACCTGGTAAAGCTCCTAAACTTCTTATTTATTCTGCTTCTTTT
CTTTATTCTGGTGTTCCTTCTCGTTTTTCTGGTTCTCGTTCTGGTACTGATTTTACTCTTACTATTTCTTCTCTTCAA
CCTGAAGATTTTGCTACTTATTATTGTCAACAACATTATACTACTCCTCCTACTTTTGGTCAAGGTACCAAGGTGGAG
ATCAAACGTACG
SEQID NO. 257
ATGGAGCTGGCGGCCTTGTGCCGCTGGGGGCTCCTCCTCGCCCTCTTGCCCCCCGGAGCCGCGAGCACCCAAGTGTGC
ACCGGCACAGACATGAAGCTGCGGCTCCCTGCCAGTCCCGAGACCCACCTGGACATGCTCCGCCACCTCTACCAGGGC
TGCCAGGTGGTGCAGGGAAACCTGGAACTCACCTACCTGCCCACCAATGCCAGCCTGTCCTTCCTGCAGGATATCCAG
GAGGTGCAGGGCTACGTGCTCATCGCTCACAACCAAGTGAGGCAGGTCCCACTGCAGAGGCTGCGGATTGTGCGAGGC
ACCCAGCTCTTTGAGGACAACTATGCCCTGGCCGTGCTAGACAATGGAGACCCGCTGAACAATACCACCCCTGTCACA
GGGGCCTCCCCAGGAGGCCTGCGGGAGCTGCAGCTTCGAAGCCTCACAGAGATCTTGAAAGGAGGGGTCTTGATCCAG
CGGAACCCCCAGCTCTGCTACCAGGACACGATTTTGTGGAAGGACATCTTCCACAAGAACAACCAGCTGGCTCTCACA
CTGATAGACACCAACCGCTCTCGGGCCTGCCACCCCTGTTCTCCGATGTGTAAGGGCTCCCGCTGCTGGGGAGAGAGT
TCTGAGGATTGTCAGAGCCTGACGCGCACTGTCTGTGCCGGTGGCTGTGCCCGCTGCAAGGGGCCACTGCCCACTGAC
TGCTGCCATGAGCAGTGTGCTGCCGGCTGCACGGGCCCCAAGCACTCTGACTGCCTGGCCTGCCTCCACTTCAACCAC
AGTGGCATCTGTGAGCTGCACTGCCCAGCCCTGGTCACCTACAACACAGACACGTTTGAGTCCATGCCCAATCCCGAG
GGCCGGTATACATTCGGCGCCAGCTGTGTGACTGCCTGTCCCTACAACTACCTTTCTACGGACGTGGGATCCTGCACC
CTCGTCTGCCCCCTGCACAACCAAGAGGTGACAGCAGAGGATGGAACACAGCGGTGTGAGAAGTGCAGCAAGCCCTGT
GCCCGAGTGTGCTATGGTCTGGGCATGGAGCACTTGCGAGAGGTGAGGGCAGTTACCAGTGCCAATATCCAGGAGTTT
GCTGGCTGCAAGAAGATCTTTGGGAGCCTGGCATTTCTGCCGGAGAGCTTTGATGGGGACCCAGCCTCCAACACTGCC
CCGCTCCAGCCAGAGCAGCTCCAAGTGTTTGAGACTCTGGAAGAGATCACAGGTTACCTATACATCTCAGCATGGCCG
GACAGCCTGCCTGACCTCAGCGTCTTCCAGAACCTGCAAGTAATCCGGGGACGAATTCTGCACAATGGCGCCTACTCG
CTGACCCTGCAAGGGCTGGGCATCAGCTGGCTGGGGCTGCGCTCACTGAGGGAACTGGGCAGTGGACTGGCCCTCATC
CACCATAACACCCACCTCTGCTTCGTGCACACGGTGCCCTGGGACCAGCTCTTTCGGAACCCGCACCAAGCTCTGCTC
CACACTGCCAACCGGCCAGAGGACGAGTGTGTGGGCGAGGGCCTGGCCTGCCACCAGCTGTGCGCCCGAGGGCACTGC
TGGGGTCCAGGGCCCACCCAGTGTGTCAACTGCAGCCAGTTCCTTCGGGGCCAGGAGTGCGTGGAGGAATGCCGAGTA
CTGCAGGGGCTCCCCAGGGAGTATGTGAATGCCAGGCACTGTTTGCCGTGCCACCCTGAGTGTCAGCCCCAGAATGGC
TCAGTGACCTGTTTTGGACCGGAGGCTGACCAGTGTGTGGCCTGTGCCCACTATAAGGACCCTCCCTTCTGCGTGGCC
CGCTGCCCCAGCGGTGTGAAACCTGACCTCTCCTACATGCCCATCTGGAAGTTTCCAGATGAGGAGGGCGCATGCCAG
CCTTGCCCCATCAACTGCACCCACTCCTGTGTGGACCTGGATGACAAGGGCTGCCCCGCCGAGCAGAGAGCCAGCCCT
CTGACGGGAGGAGGTGGGTCTGGAGGTGGAGGATCTGGTGGAGGTGGGTCTGGAGGAGGTGGGTCTCAGGTGCAGCTG
CAGGAGAGCGGCCCCGGCGACGTGAAGCCCAGCGAGACCCTGAGCCTGACCTGCACCGTGAGCGGCGGCAGCGTGAGC
AGCGGCGACTACTACTGGACCTGGATCAGGCAGAGCCCCGGCAAGGGCCTGGAGTGGATCGGCCACATCTACTACAGC
GGCAACACCAACTACAACCCCAGCCTGAAGAGCAGGCTGACCATCAGCATCGACACCAGCAAGACCACCTTCAGCCTG
CAGCTGAGCAGCGTGACCGGCGAGGACACCGCCATCTACTACTGCGTGAGGGACAGGGTGACCGGCGCCTTCGACATC
TGGGGCCAGGGCACCACCGTGACCGTGAGCAGCGCCAGCACCGGCGGCGGCGGCAGCGGCGGCGGCGGCAGCGGCGGC
GGCGGCAGCGGCGGCGGCGGCAGCGACATCCAGATGACCCAGAGCCCCAGCAGCCTGGAGGCCAGCGTGGGCGACAGG
GTGACCATCACCTGCCAGGCCAGCCAGGACATCAGCAACTACCTGAACTGGTACCAGCAGAAGCCCGGCAAGAGCCCC
AAGCTGCTGATCTACGACGCCAGCAACCTGGAGACCGGCGTGCCCGACAGGTTCAGCGGCAGCGGCAGCGGCACCGAC
TTCACCTTCACCATCAGCAGCCTGCAGGCCGAGGACGAGGGCACCTACTTCTGCCAGCACTTCGACCACCTGCCCCTG
GCCTTCGGCGGCGGCACCAAGCTGGAGATCAAGAGGACCCATCATCACCATCACCAT
SEQID NO. 258
ATGGAGCTGGCGGCCTTGTGCCGCTGGGGGCTCCTCCTCGCCCTCTTGCCCCCCGGAGCCGCGAGCAACCGGCCAGAG
GACGAGTGTGTGGGCGAGGGCCTGGCCTGCCACCAGCTGTGCGCCCGAGGGCACTGCTGGGGTCCAGGGCCCACCCAG
TGTGTCAACTGCAGCCAGTTCCTTCGGGGCCAGGAGTGCGTGGAGGAATGCCGAGTACTGCAGGGGCTCCCCAGGGAG
TATGTGAATGCCAGGCACTGTTTGCCGTGCCACCCTGAGTGTCAGCCCCAGAATGGCTCAGTGACCTGTTTTGGACCG
GAGGCTGACCAGTGTGTGGCCTGTGCCCACTATAAGGACCCTCCCTTCTGCGTGGCCCGCTGCCCCAGCGGTGTGAAA
CCTGACCTCTCCTACATGCCCATCTGGAAGTTTCCAGATGAGGAGGGCGCATGCCAGCCTTGCCCCATCAACTGCACC
CACTCCTGTGTGGACCTGGATGACAAGGGCTGCCCCGCCGAGCAGAGAGCCAGCCCTCTGACGGGAGGAGGTGGGTCT
GGAGGTGGAGGATCTGGTGGAGGTGGGTCTGGAGGAGGTGGGTCTCAGGTGCAGCTGCAGGAGAGCGGCCCCGGCGAC
GTGAAGCCCAGCGAGACCCTGAGCCTGACCTGCACCGTGAGCGGCGGCAGCGTGAGCAGCGGCGACTACTACTGGACC
TGGATCAGGCAGAGCCCCGGCAAGGGCCTGGAGTGGATCGGCCACATCTACTACAGCGGCAACACCAACTACAACCCC
AGCCTGAAGAGCAGGCTGACCATCAGCATCGACACCAGCAAGACCACCTTCAGCCTGCAGCTGAGCAGCGTGACCGGC
GAGGACACCGCCATCTACTACTGCGTGAGGGACAGGGTGACCGGCGCCTTCGACATCTGGGGCCAGGGCACCACCGTG
ACCGTGAGCAGCGCCAGCACCGGCGGCGGCGGCAGCGGCGGCGGCGGCAGCGGCGGCGGCGGCAGCGGCGGCGGCGGC
AGCGACATCCAGATGACCCAGAGCCCCAGCAGCCTGGAGGCCAGCGTGGGCGACAGGGTGACCATCACCTGCCAGGCC
AGCCAGGACATCAGCAACTACCTGAACTGGTACCAGCAGAAGCCCGGCAAGAGCCCCAAGCTGCTGATCTACGACGCC
AGCAACCTGGAGACCGGCGTGCCCGACAGGTTCAGCGGCAGCGGCAGCGGCACCGACTTCACCTTCACCATCAGCAGC
CTGCAGGCCGAGGACGAGGGCACCTACTTCTGCCAGCACTTCGACCACCTGCCCCTGGCCTTCGGCGGCGGCACCAAG
CTGGAGATCAAGAGGACCCATCATCACCATCACCAT
SEQID NO. 263
ATGCCACCTCCTCGCCTCCTCTTCTTCCTCCTCTTCCTCACCCCCATGGAAGTCAGGCCCGAGGAACCTCTAGTGGTG
AAGGTGGAAGAGGGAGATAACGCTGTGCTGCAGTGCCTCAAGGGGACCTCAGATGGCCCCACTCAGCAGCTGACCTGG
TCTCGGGAGTCCCCGCTTAAACCCTTCTTAAAACTCAGCCTGGGGCTGCCAGGCCTGGGAATCCACATGAGGCCCCTG
GCCATCTGGCTTTTCATCTTCAACGTCTCTCAACAGATGGGGGGCTTCTACCTGTGCCAGCCGGGGCCCCCCTCTGAG
AAGGCCTGGCAGCCTGGCTGGACAGTCAATGTGGAGGGCAGCGGGGAGCTGTTCCGGTGGAATGTTTCGGACCTAGGT
GGCCTGGGCTGTGGCCTGAAGAACAGGTCCTCAGAGGGCCCCAGCTCCCCTTCCGGGAAGCTCATGAGCCCCAAGCTG
TATGTGTGGGCCAAAGACCGCCCTGAGATCTGGGAGGGAGAGCCTCCGTGTCTCCCACCGAGGGACAGCCTGAACCAG
AGCCTCAGCCAGGACCTCACCATGGCCCCTGGCTCCACACTCTGGCTGTCCTGTGGGGTACCCCCTGACTCTGTGTCC
AGGGGCCCCCTCTCCTGGACCCATGTGCACCCCAAGGGGCCTAAGTCATTGCTGAGCCTAGAGCTGAAGGACGATCGC
CCGGCCAGAGATATGTGGGTAATGGAGACGGGTCTGTTGTTGCCCCGGGCCACAGCTCAAGACGCTGGAAAGTATTAT
TGTCACCGTGGCAACCTGACCATGTCATTCCACCTGGAGATCACTGCTCGGCCAGTACTATGGCACTGGCTGCTGAGG
ACTGGTGGCTGGAAGGGAGGAGGTGGGTCTGGAGGTGGAGGATCTGGTGGAGGTGGGTCTGGAGGAGGTGGGTCTGAG
GTGCAGCTGCAGCAGTCTGGGGCTGAGCTGGTGAAGCCTGGGGCCTCAGTGAAGATGTCCTGCAAGGCTTCTGGCTAC
ACATTTACCAGTTACAATATGCACTGGGTAAAGCAGACACCTGGACAGGGCCTGGAATGGATTGGAGCTATTTATCCA
GGAAATGGTGATACTTCCTACAATCAGAAGTTCAAAGGCAAGGCCACATTGACTGCAGACAAATCCTCCAGCACAGCC
TACATGCAGCTCAGCAGCCTGACATCTGAGGACTCTGCGGACTATTACTGTGCAAGATCTAATTATTACGGTAGTAGC
TACTGGTTCTTCGATGTCTGGGGCGCAGGGACCACGGTCACCGTCTCCTCAGGCAGTACTAGCGGTGGTGGCTCCGGG
GGCGGTTCCGGTGGGGGCGGCAGCAGCGACATTGTGCTGACCCAATCTCCAGCTATCCTGTCTGCATCTCCAGGGGAG
AAGGTCACAATGACTTGCAGGGCCAGCTCAAGTGTAAATTACATGGACTGGTACCAGAAGAAGCCAGGATCCTCCCCC
AAACCCTGGATTTATGCCACATCCAACCTGGCTTCTGGAGTCCCTGCTCGCTTCAGTGGCAGTGGGTCTGGGACCTCT
TACTCTCTCACAATCAGCAGAGTGGAGGCTGAAGATGCTGCCACTTATTACTGCCAGCAGTGGAGTTTTAATCCACCC
ACGTTCGGAGGGGGGACCAAGCTGGAAATAAAACATCATCACCATCACCAT
SEQID NO. 264
ATGCATCTCCTCGGCCCCTGGCTCCTGCTCCTGGTTCTAGAATACTTGGCTTTCTCTGACTCAAGTAAATGGGTTTTT
GAGCACCCTGAAACCCTCTACGCCTGGGAGGGGGCCTGCGTCTGGATCCCCTGCACCTACAGAGCCCTAGATGGTGAC
CTGGAAAGCTTCATCCTGTTCCACAATCCTGAGTATAACAAGAACACCTCGAAGTTTGATGGGACAAGACTCTATGAA
AGCACAAAGGATGGGAAGGTTCCTTCTGAGCAGAAAAGGGTGCAATTCCTGGGAGACAAGAATAAGGCCTGCACACTG
AGTATCCACCCGGTGCACCTCAATGACAGTGGTCAGCTGGGGCTGAGGATGGAGTCCAAGACTGAGAAATGGATGGAA
CGAATACACCTCAATGTCTCTGAAAGGCCTTTTCCACCTCATATCCAGCTCCCTCCAGAAATTCAAGAGTCCCAGGAA
GTCACTCTGACCTGCTTGCTGAATTTCTCCTGCTATGGGTATCCGATCCAATTGCAGTGGCTCCTAGAGGGGGTTCCA
ATGAGGCAGGCTGCTGTCACCTCGACCTCCTTGACCATCAAGTCTGTCTTCACCCGGAGCGAGCTCAAGTTCTCCCCA
CAGTGGAGTCACCATGGGAAGATTGTGACCTGCCAGCTTCAGGATGCAGATGGGAAGTTCCTCTCCAATGACACGGTG
CAGCTGAACGTGAAGCACACCCCGAAGTTGGAGATCAAGGTCACTCCCAGTGATGCCATAGTGAGGGAGGGGGACTCT
GTGACCATGACCTGCGAGGTCAGCAGCAGCAACCCGGAGTACACGACGGTATCCTGGCTCAAGGATGGGACCTCGCTG
AAGAAGCAGAATACATTCACGCTAAACCTGCGCGAAGTGACCAAGGACCAGAGTGGGAAGTACTGCTGTCAGGTCTCC
AATGACGTGGGCCCGGGAAGGTCGGAAGAAGTGTTCCTGCAAGTGCAGTATGCCCCGGAAGGAGGAGGTGGGTCTGGA
GGTGGAGGATCTGGTGGAGGTGGGTCTGGAGGAGGTGGGTCTGACATCCAGATGACACAGACTACATCCTCCCTGTCT
GCCTCTCTGGGAGACAGAGTCACCATCAGTTGCAGGGCAAGTCAGGACATTAGTAAATATTTAAATTGGTATCAGCAG
AAACCAGATGGAACTGTTAAACTCCTGATCTACCATACATCAAGATTACACTCAGGAGTCCCATCAAGGTTCAGTGGC
AGTGGGTCTGGAACAGATTATTCTCTCACCATTAGCAACCTGGAGCAAGAAGATATTGCCACTTACTTTTGCCAACAG
GGTAATACGCTTCCGTACACGTTCGGAGGGGGGACTAAGTTGGAAATAACAGGAGGAGGTGGGTCTGGAGGTGGAGGA
TCTGGTGGAGGTGGGTCTGGAGGAGGTGGGTCTGAGGTGAAACTGCAGGAGTCAGGACCTGGCCTGGTGGCGCCCTCA
CAGAGCCTGTCCGTCACATGCACTGTCTCAGGGGTCTCATTACCCGACTATGGTGTAAGCTGGATTCGCCAGCCTCCA
CGAAAGGGTCTGGAGTGGCTGGGAGTAATATGGGGTAGTGAAACCACATACTATAATTCAGCTCTCAAATCCAGACTG
ACCATCATCAAGGACAACTCCAAGAGCCAAGTTTTCTTAAAAATGAACAGTCTGCAAACTGATGACACAGCCATTTAC
TACTGTGCCAAACATTATTACTACGGTGGTAGCTATGCTATGGACTACTGGGGTCAAGGAACCTCAGTCACCGTCTCC
TCACATCATCACCATCACCAT
SEQID NO. 265
ATGCATCTCCTCGGCCCCTGGCTCCTGCTCCTGGTTCTAGAATACTTGGCTTTCTCTGACTCAAGTAAATGGGTTTTT
GAGCACCCTGAAACCCTCTACGCCTGGGAGGGGGCCTGCGTCTGGATCCCCTGCACCTACAGAGCCCTAGATGGTGAC
CTGGAAAGCTTCATCCTGTTCCACAATCCTGAGTATAACAAGAACACCTCGAAGTTTGATGGGACAAGACTCTATGAA
AGCACAAAGGATGGGAAGGTTCCTTCTGAGCAGAAAAGGGTGCAATTCCTGGGAGACAAGAATAAGGCCTGCACACTG
AGTATCCACCCGGTGCACCTCAATGACAGTGGTCAGCTGGGGCTGAGGATGGAGTCCAAGACTGAGAAATGGATGGAA
CGAATACACCTCAATGTCTCTGAAAGGCCTTTTCCACCTCATATCCAGCTCCCTCCAGAAATTCAAGAGTCCCAGGAA
GTCACTCTGACCTGCTTGCTGAATTTCTCCTGCTATGGGTATCCGATCCAATTGCAGTGGCTCCTAGAGGGGGTTCCA
ATGAGGCAGGCTGCTGTCACCTCGACCTCCTTGACCATCAAGTCTGTCTTCACCCGGAGCGAGCTCAAGTTCTCCCCA
CAGTGGAGTCACCATGGGAAGATTGTGACCTGCCAGCTTCAGGATGCAGATGGGAAGTTCCTCTCCAATGACACGGTG
CAGCTGAACGTGAAGCACACCCCGAAGTTGGAGATCAAGGTCACTCCCAGTGATGCCATAGTGAGGGAGGGGGACTCT
GTGACCATGACCTGCGAGGTCAGCAGCAGCAACCCGGAGTACACGACGGTATCCTGGCTCAAGGATGGGACCTCGCTG
AAGAAGCAGAATACATTCACGCTAAACCTGCGCGAAGTGACCAAGGACCAGAGTGGGAAGTACTGCTGTCAGGTCTCC
AATGACGTGGGCCCGGGAAGGTCGGAAGAAGTGTTCCTGCAAGTGCAGTATGCCCCGGAAGGAGGAGGTGGGTCTGGA
GGTGGAGGATCTGGTGGAGGTGGGTCTGGAGGAGGTGGGTCTGAGGTGCAGCTGCAGCAGTCTGGGGCTGAGCTGGTG
AAGCCTGGGGCCTCAGTGAAGATGTCCTGCAAGGCTTCTGGCTACACATTTACCAGTTACAATATGCACTGGGTAAAG
CAGACACCTGGACAGGGCCTGGAATGGATTGGAGCTATTTATCCAGGAAATGGTGATACTTCCTACAATCAGAAGTTC
AAAGGCAAGGCCACATTGACTGCAGACAAATCCTCCAGCACAGCCTACATGCAGCTCAGCAGCCTGACATCTGAGGAC
TCTGCGGACTATTACTGTGCAAGATCTAATTATTACGGTAGTAGCTACTGGTTCTTCGATGTCTGGGGCGCAGGGACC
ACGGTCACCGTCTCCTCAGGCAGTACTAGCGGTGGTGGCTCCGGGGGCGGTTCCGGTGGGGGCGGCAGCAGCGACATT
GTGCTGACCCAATCTCCAGCTATCCTGTCTGCATCTCCAGGGGAGAAGGTCACAATGACTTGCAGGGCCAGCTCAAGT
GTAAATTACATGGACTGGTACCAGAAGAAGCCAGGATCCTCCCCCAAACCCTGGATTTATGCCACATCCAACCTGGCT
TCTGGAGTCCCTGCTCGCTTCAGTGGCAGTGGGTCTGGGACCTCTTACTCTCTCACAATCAGCAGAGTGGAGGCTGAA
GATGCTGCCACTTATTACTGCCAGCAGTGGAGTTTTAATCCACCCACGTTCGGAGGGGGGACCAAGCTGGAAATAAAA
CATCATCACCATCACCAT
SEQID NO. 266
AAGCTTGTTGACATTGATTATTGACTAGTTATTAATAGTAATCAATTACGGGGTCATTAGTTCATAGCCCATATATGG
AGTTCCGCGTTACATAACTTACGGTAAATGGCCCGCCTGGCTGACCGCCCAACGACCCCCGCCCATTGACGTCAATAA
TGACGTATGTTCCCATAGTAACGCCAATAGGGACTTTCCATTGACGTCAATGGGTGGAGTATTTACGGTAAACTGCCC
ACTTGGCAGTACATCAAGTGTATCATATGCCAAGTACGCCCCCTATTGACGTCAATGACGGTAAATGGCCCGCCTGGC
ATTATGCCCAGTACATGACCTTATGGGACTTTCCTACTTGGCAGTACATCTACGTATTAGTCATCGCTATTACCATGG
TGATGCGGTTTTGGCAGTACATCAATGGGCGTGGATAGCGGTTTGACTCACGGGGATTTCCAAGTCTCCACCCCATTG
ACGTCAATGGGAGTTTGTTTTGGCACCAAAATCAACGGGACTTTCCAAAATGTCGTAACAACTCCGCCCCATTGACGC
AAATGGGCGGTAGGCGTGTACGGTGGGAGGTCTATATAAGCAGAGCTCAAGCTTAACTAGTTAGCGGACCGACGCGTA
CGCGGCCGCTCGAGATGGAGAGCGACGAGAGCGGCCTGCCCGCCATGGAGATCGAGTGCCGCATCACCGGCACCCTGA
ACGGCGTGGAGTTCGAGCTGGTGGGCGGCGGAGAGGGCACCCCCGAGCAGGGCCGCATGACCAACAAGATGAAGAGCA
CCAAAGGCGCCCTGACCTTCAGCCCCTACCTGCTGAGCCACGTGATGGGCTACGGCTTCTACCACTTCGGCACCTACC
CCAGCGGCTACGAGAACCCCTTCCTGCACGCCATCAACAACGGCGGCTACACCAACACCCGCATCGAGAAGTACGAGG
ACGGCGGCGTGCTGCACGTGAGCTTCAGCTACCGCTACGAGGCCGGCCGCGTGATCGGCGACTTCAAGGTGATGGGCA
CCGGCTTCCCCGAGGACAGCGTGATCTTCACCGACAAGATCATCCGCAGCAACGCCACCGTGGAGCACCTGCACCCCA
TGGGCGATAACGATCTGGATGGCAGCTTCACCCGCACCTTCAGCCTGCGCGACGGCGGCTACTACAGCTCCGTGGTGG
ACAGCCACATGCACTTCAAGAGCGCCATCCACCCCAGCATCCTGCAGAACGGGGGCCCCATGTTCGCCTTCCGCCGCG
TGGAGGAGGATCACAGCAACACCGAGCTGGGCATCGTGGAGTACCAGCACGCCTTCAAGACCCCGGATGCAGATGCCG
GTGAAGAAAGAGTT
SEQID NO. 267
ATGCCACCTCCTCGCCTCCTCTTCTTCCTCCTCTTCCTCACCCCCATGGAAGTCAGGCCCGAGGAACCTCTAGTGGTG
AAGGTGGAAGAGGGAGATAACGCTGTGCTGCAGTGCCTCAAGGGGACCTCAGATGGCCCCACTCAGCAGCTGACCTGG
TCTCGGGAGTCCCCGCTTAAACCCTTCTTAAAACTCAGCCTGGGGCTGCCAGGCCTGGGAATCCACATGAGGCCCCTG
GCCATCTGGCTTTTCATCTTCAACGTCTCTCAACAGATGGGGGGCTTCTACCTGTGCCAGCCGGGGCCCCCCTCTGAG
AAGGCCTGGCAGCCTGGCTGGACAGTCAATGTGGAGGGCAGCGGGGAGCTGTTCCGGTGGAATGTTTCGGACCTAGGT
GGCCTGGGCTGTGGCCTGAAGAACAGGTCCTCAGAGGGCCCCAGCTCCCCTTCCGGGAAGCTCATGAGCCCCAAGCTG
TATGTGTGGGCCAAAGACCGCCCTGAGATCTGGGAGGGAGAGCCTCCGTGTCTCCCACCGAGGGACAGCCTGAACCAG
AGCCTCAGCCAGGACCTCACCATGGCCCCTGGCTCCACACTCTGGCTGTCCTGTGGGGTACCCCCTGACTCTGTGTCC
AGGGGCCCCCTCTCCTGGACCCATGTGCACCCCAAGGGGCCTAAGTCATTGCTGAGCCTAGAGCTGAAGGACGATCGC
CCGGCCAGAGATATGTGGGTAATGGAGACGGGTCTGTTGTTGCCCCGGGCCACAGCTCAAGACGCTGGAAAGTATTAT
TGTCACCGTGGCAACCTGACCATGTCATTCCACCTGGAGATCACTGCTCGGCCAGTACTATGGCACTGGCTGCTGAGG
ACTGGTGGCTGGAAGGGAGGAGGTGGGTCTGGAGGTGGAGGATCTGGTGGAGGTGGGTCTGGAGGAGGTGGGTCTGAC
ATCCTGATGACCCAATCTCCATCCTCCATGTCTGTATCTCTGGGAGACACAGTCAGCATCACTTGCCATTCAAGTCAG
GACATTAACAGTAATATAGGGTGGTTGCAGCAGAGACCAGGGAAATCATTTAAGGGCCTGATCTATCATGGAACCAAC
TTGGACGATGAAGTTCCATCAAGGTTCAGTGGCAGTGGATCTGGAGCCGATTATTCTCTCACCATCAGCAGCCTGGAA
TCTGAAGATTTTGCAGACTATTACTGTGTACAGTATGCTCAGTTTCCGTGGACGTTCGGTGGAGGCACCAAGCTCGAA
ATCAAACGTGGAGGAGGTGGGTCTGGAGGTGGAGGATCTGGTGGAGGTGGGTCTGGAGGAGGTGGGTCTATGAGAGTG
CTGATTCTTTTGTGGCTGTTCACAGCCTTTCCTGGTGTCCTGTCTGATGTGCAGCTTCAGGAGTCGGGACCTAGCCTG
GTGAAACCTTCTCAGTCTCTGTCCCTCACCTGCACTGTCACTGGCTACTCAATCACCAGTGATTTTGCCTGGAACTGG
ATCCGGCAGTTTCCAGGAAACAAGCTGGAGTGGATGGGCTACATAAGTTATAGTGGTAACACTAGGTACAACCCATCT
CTCAAAAGTCGAATCTCTATCACTCGAGACACATCCAAGAACCAATTCTTCCTGCAGTTGAATTCTGTGACTATTGAG
GACACAGCCACATATTACTGTGTAACGGCGGGACGCGGGTTTCCTTATTGGGGCCAAGGGACTCTGGTCACTGTCTCT
GCACATCATCACCATCACCAT
SEQID NO. 268
ATGCATCTCCTCGGCCCCTGGCTCCTGCTCCTGGTTCTAGAATACTTGGCTTTCTCTGACTCAAGTAAATGGGTTTTT
GAGCACCCTGAAACCCTCTACGCCTGGGAGGGGGCCTGCGTCTGGATCCCCTGCACCTACAGAGCCCTAGATGGTGAC
CTGGAAAGCTTCATCCTGTTCCACAATCCTGAGTATAACAAGAACACCTCGAAGTTTGATGGGACAAGACTCTATGAA
AGCACAAAGGATGGGAAGGTTCCTTCTGAGCAGAAAAGGGTGCAATTCCTGGGAGACAAGAATAAGGCCTGCACACTG
AGTATCCACCCGGTGCACCTCAATGACAGTGGTCAGCTGGGGCTGAGGATGGAGTCCAAGACTGAGAAATGGATGGAA
CGAATACACCTCAATGTCTCTGAAAGGCCTTTTCCACCTCATATCCAGCTCCCTCCAGAAATTCAAGAGTCCCAGGAA
GTCACTCTGACCTGCTTGCTGAATTTCTCCTGCTATGGGTATCCGATCCAATTGCAGTGGCTCCTAGAGGGGGTTCCA
ATGAGGCAGGCTGCTGTCACCTCGACCTCCTTGACCATCAAGTCTGTCTTCACCCGGAGCGAGCTCAAGTTCTCCCCA
CAGTGGAGTCACCATGGGAAGATTGTGACCTGCCAGCTTCAGGATGCAGATGGGAAGTTCCTCTCCAATGACACGGTG
CAGCTGAACGTGAAGCACACCCCGAAGTTGGAGATCAAGGTCACTCCCAGTGATGCCATAGTGAGGGAGGGGGACTCT
GTGACCATGACCTGCGAGGTCAGCAGCAGCAACCCGGAGTACACGACGGTATCCTGGCTCAAGGATGGGACCTCGCTG
AAGAAGCAGAATACATTCACGCTAAACCTGCGCGAAGTGACCAAGGACCAGAGTGGGAAGTACTGCTGTCAGGTCTCC
AATGACGTGGGCCCGGGAAGGTCGGAAGAAGTGTTCCTGCAAGTGCAGTATGCCCCGGAAGGAGGAGGTGGGTCTGGA
GGTGGAGGATCTGGTGGAGGTGGGTCTGGAGGAGGTGGGTCTGACATCCTGATGACCCAATCTCCATCCTCCATGTCT
GTATCTCTGGGAGACACAGTCAGCATCACTTGCCATTCAAGTCAGGACATTAACAGTAATATAGGGTGGTTGCAGCAG
AGACCAGGGAAATCATTTAAGGGCCTGATCTATCATGGAACCAACTTGGACGATGAAGTTCCATCAAGGTTCAGTGGC
AGTGGATCTGGAGCCGATTATTCTCTCACCATCAGCAGCCTGGAATCTGAAGATTTTGCAGACTATTACTGTGTACAG
TATGCTCAGTTTCCGTGGACGTTCGGTGGAGGCACCAAGCTCGAAATCAAACGTGGAGGAGGTGGGTCTGGAGGTGGA
GGATCTGGTGGAGGTGGGTCTGGAGGAGGTGGGTCTATGAGAGTGCTGATTCTTTTGTGGCTGTTCACAGCCTTTCCT
GGTGTCCTGTCTGATGTGCAGCTTCAGGAGTCGGGACCTAGCCTGGTGAAACCTTCTCAGTCTCTGTCCCTCACCTGC
ACTGTCACTGGCTACTCAATCACCAGTGATTTTGCCTGGAACTGGATCCGGCAGTTTCCAGGAAACAAGCTGGAGTGG
ATGGGCTACATAAGTTATAGTGGTAACACTAGGTACAACCCATCTCTCAAAAGTCGAATCTCTATCACTCGAGACACA
TCCAAGAACCAATTCTTCCTGCAGTTGAATTCTGTGACTATTGAGGACACAGCCACATATTACTGTGTAACGGCGGGA
CGCGGGTTTCCTTATTGGGGCCAAGGGACTCTGGTCACTGTCTCTGCACATCATCACCATCACCAT
SEQID NO. 271
ATGCTCAGGCTGCTCTTGGCTCTCAACTTATTCCCTTCAATTCAAGTAACAGGAGACATCCAGATGACACAGACTACA
TCCTCCCTGTCTGCCTCTCTGGGAGACAGAGTCACCATCAGTTGCAGGGCAAGTCAGGACATTAGTAAATATTTAAAT
TGGTATCAGCAGAAACCAGATGGAACTGTTAAACTCCTGATCTACCATACATCAAGATTACACTCAGGAGTCCCATCA
AGGTTCAGTGGCAGTGGGTCTGGAACAGATTATTCTCTCACCATTAGCAACCTGGAGCAAGAAGATATTGCCACTTAC
TTTTGCCAACAGGGTAATACGCTTCCGTACACGTTCGGAGGGGGGACTAAGTTGGAAATAACAGGAGGAGGTGGGTCT
GGAGGTGGAGGATCTGGTGGAGGTGGGTCTGGAGGAGGTGGGTCTGAGGTGAAACTGCAGGAGTCAGGACCTGGCCTG
GTGGCGCCCTCACAGAGCCTGTCCGTCACATGCACTGTCTCAGGGGTCTCATTACCCGACTATGGTGTAAGCTGGATT
CGCCAGCCTCCACGAAAGGGTCTGGAGTGGCTGGGAGTAATATGGGGTAGTGAAACCACATACTATAATTCAGCTCTC
AAATCCAGACTGACCATCATCAAGGACAACTCCAAGAGCCAAGTTTTCTTAAAAATGAACAGTCTGCAAACTGATGAC
ACAGCCATTTACTACTGTGCCAAACATTATTACTACGGTGGTAGCTATGCTATGGACTACTGGGGTCAAGGAACCTCA
GTCACCGTCTCCTCAGACTACAAAGACGATGACGACAAGATTGAAGTTATGTATCCTCCTCCTTACCTAGACAATGAG
AAGAGCAATGGAACCATTATCCATGTGAAAGGGAAACACCTTTGTCCAAGTCCCCTATTTCCCGGACCTTCTAAGCCC
TTTTGGGTGCTGGTGGTGGTTGGTGGAGTCCTGGCTTGCTATAGCTTGCTAGTAACAGTGGCCTTTATTATTTTCTGG
GTGAGGAGTAAGAGGAGCAGGCTCCTGCACAGTGACTACATGAACATGACTCCCCGCCGCCCCGGGCCCACCCGCAAG
CATTACCAGCCCTATGCCCCACCACGCGACTTCGCAGCCTATCGCTCCAAACGGGGCAGAAAGAAACTCCTGTATATA
TTCAAACAACCATTTATGAGACCAGTACAAACTACTCAAGAGGAAGATGGCTGTAGCTGCCGATTTCCAGAAGAAGAA
GAAGGAGGATGTGAACTGAGAGTGAAGTTCAGCAGGAGCGCAGACGCCCCCGCGTACCAGCAGGGCCAGAACCAGCTC
TATAACGAGCTCAATCTAGGACGAAGAGAGGAGTACGATGTTTTGGACAAGAGACGTGGCCGGGACCCTGAGATGGGG
GGAAAGCCGCAGAGAAGGAAGAACCCTCAGGAAGGCCTGTACAATGAACTGCAGAAAGATAAGATGGCGGAGGCCTAC
AGTGAGATTGGGATGAAAGGCGAGCGCCGGAGGGGCAAGGGGCACGATGGCCTTTACCAGGGTCTCAGTACAGCCACC
AAGGACACCTACGACGCCCTTCACATGCAGGCCCTGCCCCCTCGC
SEQID NO. 272
ATGCTCAGGCTGCTCTTGGCTCTCAACTTATTCCCTTCAATTCAAGTAACAGGAGACATCCAGATGACACAGACTACA
TCCTCCCTGTCTGCCTCTCTGGGAGACAGAGTCACCATCAGTTGCAGGGCAAGTCAGGACATTAGTAAATATTTAAAT
TGGTATCAGCAGAAACCAGATGGAACTGTTAAACTCCTGATCTACCATACATCAAGATTACACTCAGGAGTCCCATCA
AGGTTCAGTGGCAGTGGGTCTGGAACAGATTATTCTCTCACCATTAGCAACCTGGAGCAAGAAGATATTGCCACTTAC
TTTTGCCAACAGGGTAATACGCTTCCGTACACGTTCGGAGGGGGGACTAAGTTGGAAATAACAGGAGGAGGTGGGTCT
GGAGGTGGAGGATCTGGTGGAGGTGGGTCTGGAGGAGGTGGGTCTGAGGTGAAACTGCAGGAGTCAGGACCTGGCCTG
GTGGCGCCCTCACAGAGCCTGTCCGTCACATGCACTGTCTCAGGGGTCTCATTACCCGACTATGGTGTAAGCTGGATT
CGCCAGCCTCCACGAAAGGGTCTGGAGTGGCTGGGAGTAATATGGGGTAGTGAAACCACATACTATAATTCAGCTCTC
AAATCCAGACTGACCATCATCAAGGACAACTCCAAGAGCCAAGTTTTCTTAAAAATGAACAGTCTGCAAACTGATGAC
ACAGCCATTTACTACTGTGCCAAACATTATTACTACGGTGGTAGCTATGCTATGGACTACTGGGGTCAAGGAACCTCA
GTCACCGTCTCCTCAGACTACAAAGACGATGACGACAAGATTGAAGTTATGTATCCTCCTCCTTACCTAGACAATGAG
AAGAGCAATGGAACCATTATCCATGTGAAAGGGAAACACCTTTGTCCAAGTCCCCTATTTCCCGGACCTTCTAAGCCC
TTTTGGGTGCTGGTGGTGGTTGGTGGAGTCCTGGCTTGCTATAGCTTGCTAGTAACAGTGGCCTTTATTATTTTCTGG
GTGAGGAGTAAGAGGAGCAGGCTCCTGCACAGTGACTACATGAACATGACTCCCCGCCGCCCCGGGCCCACCCGCAAG
CATTACCAGCCCTATGCCCCACCACGCGACTTCGCAGCCTATCGCTCCAAACGGGGCAGAAAGAAACTCCTGTATATA
TTCAAACAACCATTTATGAGACCAGTACAAACTACTCAAGAGGAAGATGGCTGTAGCTGCCGATTTCCAGAAGAAGAA
GAAGGAGGATGTGAACTGAGAGTGAAGTTCAGCAGGAGCGCAGACGCCCCCGCGTACCAGCAGGGCCAGAACCAGCTC
TATAACGAGCTCAATCTAGGACGAAGAGAGGAGTACGATGTTTTGGACAAGAGACGTGGCCGGGACCCTGAGATGGGG
GGAAAGCCGCAGAGAAGGAAGAACCCTCAGGAAGGCCTGTACAATGAACTGCAGAAAGATAAGATGGCGGAGGCCTAC
AGTGAGATTGGGATGAAAGGCGAGCGCCGGAGGGGCAAGGGGCACGATGGCCTTTACCAGGGTCTCAGTACAGCCACC
AAGGACACCTACGACGCCCTTCACATGCAGGCCCTGCCCCCTCGC
SEQID NO. 273
TATTAATAGTAATCAATTACGGGGTCATTAGTTCATAGCCCATATATGGAGTTCCGCGTTACATAACTTACGGTAAAT
GGCCCGCCTGGCTGACCGCCCAACGACCCCCGCCCATTGACGTCAATAATGACGTATGTTCCCATAGTAACGCCAATA
GGGACTTTCCATTGACGTCAATGGGTGGAGTATTTACGGTAAACTGCCCACTTGGCAGTACATCAAGTGTATCATATG
CCAAGTACGCCCCCTATTGACGTCAATGACGGTAAATGGCCCGCCTGGCATTATGCCCAGTACATGACCTTATGGGAC
TTTCCTACTTGGCAGTACATCTACGTATTAGTCATCGCTATTACCATGGTGATGCGGTTTTGGCAGTACATCAATGGG
CGTGGATAGCGGTTTGACTCACGGGGATTTCCAAGTCTCCACCCCATTGACGTCAATGGGAGTTTGTTTTGGCACCAA
AATCAACGGGACTTTCCAAAATGTCGTAACAACTCCGCCCCATTGACGCAAATGGGCGGTAGGCGTGTACGGTGGGAG
GTCTATATAAGCAGAGCTCGCGGCCGCGCCACCATGCCACCTCCTCGCCTCCTCTTCTTCCTCCTCTTCCTCACCCCC
ATGGAAGTCAGGCCCGAGGAACCTCTAGTGGTGAAGGTGGAAGAGGGAGATAACGCTGTGCTGCAGTGCCTCAAGGGG
ACCTCAGATGGCCCCACTCAGCAGCTGACTTGGTCTCGGGAGTCCCCGCTTAAACCCTTCTTAAAACTCAGCCTGGGG
CTGCCAGGCCTGGGAATCCACATGAGGCCCCTGGCCATCTGGCTTTTCATCTTCAACGTCTCTCAACAGATGGGGGGC
TTCTACCTGTGCCAGCCGGGGCCCCCCTCTGAGAAGGCCTGGCAGCCTGGCTGGACAGTCAATGTGGAGGGCAGCGGG
GAGCTGTTCCGGTGGAATGTTTCGGACCTAGGTGGCCTGGGCTGTGGCCTGAAGAACAGGTCCTCAGAGGGCCCCAGC
TCCCCTTCCGGGAAGCTCATGAGCCCCAAGCTGTATGTGTGGGCCAAAGACCGCCCTGAGATCTGGGAGGGAGAGCCT
CCGTGTCTCCCACCGAGGGACAGCCTGAACCAGAGCCTCAGCCAGGACCTCACCATGGCCCCTGGCTCCACACTCTGG
CTGTCCTGTGGGGTACCCCCTGACTCTGTGTCCAGGGGCCCCCTCTCCTGGACCCATGTGCACCCCAAGGGGCCTAAG
TCATTGCTGAGCCTAGAGCTGAAGGACGATCGCCCGGCCAGAGATATGTGGGTAATGGAGACGGGTCTGTTGTTGCCC
CGGGCCACAGCTCAAGACGCTGGAAAGTATTATTGTCACCGTGGCAACCTGACCATGTCATTCCACCTGGAGATCACT
GCTCGGCCAGGGGGAGGTGGGTCTGGAGGTGGAGGATCTGGTGGAGGTGGGTCTGGTGGAGGTGGGTCTGAGGTGCAG
CTGGTGGAGTCTGGTGGTGGTCTTGTTCAACCCGGTGGTTCTCTTCGTCTTTCTTGTGCTGCTTCTGGTTTTAATATT
AAAGATACTTATATTCATTGGGTTCGTCAAGCTCCTGGTAAAGGTCTTGAATGGGTTGCTCGTATTTATCCTACTAAT
GGTTATACTCGTTATGCTGATTCTGTTAAAGGTCGTTTTACTATTTCTGCTGATACTTCTAAAAATACTGCTTATCTT
CAAATGAACTCTCTTCGTGCTGAAGATACTGCTGTTTATTATTGTTCTCGTTGGGGTGGTGATGGTTTTTATGCTATG
GATTATTGGGGTCAAGGTACTCTTGTCACCGTCTCCTCAGCTAGCACCGGGGGAGGTGGGTCTGGAGGTGGAGGATCT
GGTGGAGGTGGGTCTGACATCCAGATGACCCAGTCTCCTTCTTCTCTTTCTGCTTCTGTTGGTGATCGTGTTACTATT
ACTTGTCGTGCTTCTCAAGATGTTAATACTGCTGTTGCTTGGTATCAACAAAAACCCGGTAAAGCTCCTAAACTTCTT
ATTTATTCTGCTTCTTTTCTTTATTCTGGTGTTCCTTCTCGTTTTTCTGGTTCTCGTTCTGGTACTGATTTTACTCTT
ACTATTTCTTCTCTTCAACCTGAAGATTTTGCTACTTATTATTGTCAACAACATTATACTACTCCTCCTACTTTTGGT
CAAGGTACCAAGGTGGAGATCAAACGTACGCATCATCACCATCACCAT
SEQID NO. 274
GGGAGAAGCTAGACTTAAAATCTTCCATTGCAGCTGTAAACACATCTGGACAATAGTCTGTTTTCTGCATTTGTGAAT
CCCACACCCATGGAACTATGAATCGTGCATCAGAGTTATTTAAAACCACCGTGCATGGAGTGAACCAATACCGAGGTG
TTTGCTTATCATTTTCCTTTGAGCACACAGCACAGCCTTGAACTCAGTGACACTCCTAAGAGGGCTCTAGGGTCAGGC
CAACTTAGATGAGATGCTAGTCTTTAGCTAAAGATGCCCTTCCACCCCCGTTGCACGACCTTGCTTCTCAGTCTTTGT
TGAGTCTTCTGGGGGAGAATCCCCCTAGAGGACTCAGTTTACAAAACCCTAAGTGAGACCACTGCCAAGAAGTGCTTG
CTCACCCCTCCTGCCGCGGCAGGGAATCCCCCTTTCCTTGTACAGGCAAAACACAAAAAAGGACTCATAAGTGAAGCC
TGATCCTTCTCACCAAACACTGCCCACACCTCCTAGTAATTGAACTTGAAAAAAAAAACTGGTTTGAAAAATTACCGC
AAACCATATTGTCATAAAAAAAAAAAAAAACACTTCCTATATGAGATCACAGAACAGAGTAGGCACAAGTTCCTGCTG
AGCAGATCAGCCTAATGCTTAAATAGAACAACTCCTGGCTGTCATTGACATTGTCTAAAAGCCAAGATGACAGACTGA
GAGGCCTGAGCCCTTGTTCTGGCATTCTCCCAGGAAGATGCAGTAAAGGGGTTGACCCAATATACGCGGCCGCGCCAC
CATGCCACCTCCTCGCCTCCTCTTCTTCCTCCTCTTCCTCACCCCCATGGAAGTCAGGCCCGAGGAACCTCTAGTGGT
GAAGGTGGAAGAGGGAGATAACGCTGTGCTGCAGTGCCTCAAGGGGACCTCAGATGGCCCCACTCAGCAGCTGACTTG
GTCTCGGGAGTCCCCGCTTAAACCCTTCTTAAAACTCAGCCTGGGGCTGCCAGGCCTGGGAATCCACATGAGGCCCCT
GGCCATCTGGCTTTTCATCTTCAACGTCTCTCAACAGATGGGGGGCTTCTACCTGTGCCAGCCGGGGCCCCCCTCTGA
GAAGGCCTGGCAGCCTGGCTGGACAGTCAATGTGGAGGGCAGCGGGGAGCTGTTCCGGTGGAATGTTTCGGACCTAGG
TGGCCTGGGCTGTGGCCTGAAGAACAGGTCCTCAGAGGGCCCCAGCTCCCCTTCCGGGAAGCTCATGAGCCCCAAGCT
GTATGTGTGGGCCAAAGACCGCCCTGAGATCTGGGAGGGAGAGCCTCCGTGTCTCCCACCGAGGGACAGCCTGAACCA
GAGCCTCAGCCAGGACCTCACCATGGCCCCTGGCTCCACACTCTGGCTGTCCTGTGGGGTACCCCCTGACTCTGTGTC
CAGGGGCCCCCTCTCCTGGACCCATGTGCACCCCAAGGGGCCTAAGTCATTGCTGAGCCTAGAGCTGAAGGACGATCG
CCCGGCCAGAGATATGTGGGTAATGGAGACGGGTCTGTTGTTGCCCCGGGCCACAGCTCAAGACGCTGGAAAGTATTA
TTGTCACCGTGGCAACCTGACCATGTCATTCCACCTGGAGATCACTGCTCGGCCAGGGGGAGGTGGGTCTGGAGGTGG
AGGATCTGGTGGAGGTGGGTCTGGTGGAGGTGGGTCTGAGGTGCAGCTGGTGGAGTCTGGTGGTGGTCTTGTTCAACC
CGGTGGTTCTCTTCGTCTTTCTTGTGCTGCTTCTGGTTTTAATATTAAAGATACTTATATTCATTGGGTTCGTCAAGC
TCCTGGTAAAGGTCTTGAATGGGTTGCTCGTATTTATCCTACTAATGGTTATACTCGTTATGCTGATTCTGTTAAAGG
TCGTTTTACTATTTCTGCTGATACTTCTAAAAATACTGCTTATCTTCAAATGAACTCTCTTCGTGCTGAAGATACTGC
TGTTTATTATTGTTCTCGTTGGGGTGGTGATGGTTTTTATGCTATGGATTATTGGGGTCAAGGTACTCTTGTCACCGT
CTCCTCAGCTAGCACCGGGGGAGGTGGGTCTGGAGGTGGAGGATCTGGTGGAGGTGGGTCTGACATCCAGATGACCCA
GTCTCCTTCTTCTCTTTCTGCTTCTGTTGGTGATCGTGTTACTATTACTTGTCGTGCTTCTCAAGATGTTAATACTGC
TGTTGCTTGGTATCAACAAAAACCCGGTAAAGCTCCTAAACTTCTTATTTATTCTGCTTCTTTTCTTTATTCTGGTGT
TCCTTCTCGTTTTTCTGGTTCTCGTTCTGGTACTGATTTTACTCTTACTATTTCTTCTCTTCAACCTGAAGATTTTGC
TACTTATTATTGTCAACAACATTATACTACTCCTCCTACTTTTGGTCAAGGTACCAAGGTGGAGATCAAACGTACGCA
TCATCACCATCACCAT
SEQID NO. 275
AATTTAAGGCAGGATGTCTCAGAGTCTGGGAAAATCCCACTTTCCTCCTGCTACACCTTACAGTTGTGAGAAAGCACA
TTTCAGACAACAGGGAAAACCCATACTTCACCACAACAACACACTATACATTGTCTGGTCCACTGGAGCATAAATTAA
AGAGAAACAATGTAGTCAAGCAAGTAGGCGGCAAGAGGAAGGGGGCGGAGACATCATCAGGGAGTATAAACTCTGAGA
TGCCTCAGAGCCTCACAGACTCAACAAGAGCTCCAGCAAAGACTTTCACTGTAGCTTGACTTGACCTGAGATTAACTA
GGGAATCTTGAGAATAAAGGCGGCCGCGCCACCATGCCACCTCCTCGCCTCCTCTTCTTCCTCCTCTTCCTCACCCCC
ATGGAAGTCAGGCCCGAGGAACCTCTAGTGGTGAAGGTGGAAGAGGGAGATAACGCTGTGCTGCAGTGCCTCAAGGGG
ACCTCAGATGGCCCCACTCAGCAGCTGACTTGGTCTCGGGAGTCCCCGCTTAAACCCTTCTTAAAACTCAGCCTGGGG
CTGCCAGGCCTGGGAATCCACATGAGGCCCCTGGCCATCTGGCTTTTCATCTTCAACGTCTCTCAACAGATGGGGGGC
TTCTACCTGTGCCAGCCGGGGCCCCCCTCTGAGAAGGCCTGGCAGCCTGGCTGGACAGTCAATGTGGAGGGCAGCGGG
GAGCTGTTCCGGTGGAATGTTTCGGACCTAGGTGGCCTGGGCTGTGGCCTGAAGAACAGGTCCTCAGAGGGCCCCAGC
TCCCCTTCCGGGAAGCTCATGAGCCCCAAGCTGTATGTGTGGGCCAAAGACCGCCCTGAGATCTGGGAGGGAGAGCCT
CCGTGTCTCCCACCGAGGGACAGCCTGAACCAGAGCCTCAGCCAGGACCTCACCATGGCCCCTGGCTCCACACTCTGG
CTGTCCTGTGGGGTACCCCCTGACTCTGTGTCCAGGGGCCCCCTCTCCTGGACCCATGTGCACCCCAAGGGGCCTAAG
TCATTGCTGAGCCTAGAGCTGAAGGACGATCGCCCGGCCAGAGATATGTGGGTAATGGAGACGGGTCTGTTGTTGCCC
CGGGCCACAGCTCAAGACGCTGGAAAGTATTATTGTCACCGTGGCAACCTGACCATGTCATTCCACCTGGAGATCACT
GCTCGGCCAGGGGGAGGTGGGTCTGGAGGTGGAGGATCTGGTGGAGGTGGGTCTGGTGGAGGTGGGTCTGAGGTGCAG
CTGGTGGAGTCTGGTGGTGGTCTTGTTCAACCCGGTGGTTCTCTTCGTCTTTCTTGTGCTGCTTCTGGTTTTAATATT
AAAGATACTTATATTCATTGGGTTCGTCAAGCTCCTGGTAAAGGTCTTGAATGGGTTGCTCGTATTTATCCTACTAAT
GGTTATACTCGTTATGCTGATTCTGTTAAAGGTCGTTTTACTATTTCTGCTGATACTTCTAAAAATACTGCTTATCTT
CAAATGAACTCTCTTCGTGCTGAAGATACTGCTGTTTATTATTGTTCTCGTTGGGGTGGTGATGGTTTTTATGCTATG
GATTATTGGGGTCAAGGTACTCTTGTCACCGTCTCCTCAGCTAGCACCGGGGGAGGTGGGTCTGGAGGTGGAGGATCT
GGTGGAGGTGGGTCTGACATCCAGATGACCCAGTCTCCTTCTTCTCTTTCTGCTTCTGTTGGTGATCGTGTTACTATT
ACTTGTCGTGCTTCTCAAGATGTTAATACTGCTGTTGCTTGGTATCAACAAAAACCCGGTAAAGCTCCTAAACTTCTT
ATTTATTCTGCTTCTTTTCTTTATTCTGGTGTTCCTTCTCGTTTTTCTGGTTCTCGTTCTGGTACTGATTTTACTCTT
ACTATTTCTTCTCTTCAACCTGAAGATTTTGCTACTTATTATTGTCAACAACATTATACTACTCCTCCTACTTTTGGT
CAAGGTACCAAGGTGGAGATCAAACGTACGCATCATCACCATCACCAT
SEQID NO. 276
TAACGAAGACAGGGCCATGTAGAGGGCCCCAGGGAGTGAAAGGGCCTCCAGGACCTCCAGGTATGGAATACAGGGGAC
GTTTAAGAAGATATGGCCACACACTGGGGCCCTGAGAAGTGAGAGCTTCATGAAAAAAATCAGGGACCCCAGAGTTCC
TTGGAAGCCAAGACTGAAACCAGCATTATGAGTCTCCGGGTCAGAATGAAAGAAGAAGGCCTGCCCCAGTGGGGTCTG
TGAATTCCCGGGGGTGATTTCACTCCCCGGGGCTGTCCCAGGCTTGTCCCTGCTACCCCCACCCAGCCTTTCCTGAGG
CCTCAAGCCTGCCACCAAGCCCCCAGCTCCTTCTCCCCGCAGGGACCCAAACACAGGCCTCGGGACTCAACACAGCTT
TTCCCTCCAACCCCGTTTTCTCTCCCTCAAGGACTCAGCTTTCTGAGGCCCCTCCCAGTTCTAGTTCTATCTTTTTCC
TGCATCCTGTCTGGAAGTTAGAAGGAAACAGACCACAGACCCGGTCCCCAAAAGAAATGGAGGCAATAGGTTTTGAGG
GGCATGGGGACGGGGTTCAGCCTCCAGGGTCCTACACACAAATCAGTCAGTGGCCCAGAAGACCCCCTCGGAATCGGA
GCAGGGAGGATGGGGAGTGTGAGGGGTATCCTTGATGCTTGTGTGTCCCCAACTTTCCAAATCCCCGCCCCCGCGATG
GAGAAGAAACCGAGACAGAAGGTGCAGGGCCCACTACCGCTTCCTCCAGATGAGCTCATGGGTTTCTCCACCAAGGAA
GTTTTCCGCTGGTTGAATGATTCTTTCCCCGCCCTCCTCTCGCCCCAGGGACATATAAAGGCAGTTGTTGGCACACCC
AGCCAGCAGACGCTCCCTCAGCAAGGACAGCAGAGGACCAGCTAAGAGGGAGAGAAGCAACTACAGACCCCCCCTGAA
AACAACCCTCAGACGCCACATCCCCTGACAAGCTGCCAGGCAGGTTCTCTTCCTCTCACATACTGACCCACGGCTCCA
CCCTCTCTCCCCTGGAAAGGACACGCGGCCGCGCCACCATGCCACCTCCTCGCCTCCTCTTCTTCCTCCTCTTCCTCA
CCCCCATGGAAGTCAGGCCCGAGGAACCTCTAGTGGTGAAGGTGGAAGAGGGAGATAACGCTGTGCTGCAGTGCCTCA
AGGGGACCTCAGATGGCCCCACTCAGCAGCTGACTTGGTCTCGGGAGTCCCCGCTTAAACCCTTCTTAAAACTCAGCC
TGGGGCTGCCAGGCCTGGGAATCCACATGAGGCCCCTGGCCATCTGGCTTTTCATCTTCAACGTCTCTCAACAGATGG
GGGGCTTCTACCTGTGCCAGCCGGGGCCCCCCTCTGAGAAGGCCTGGCAGCCTGGCTGGACAGTCAATGTGGAGGGCA
GCGGGGAGCTGTTCCGGTGGAATGTTTCGGACCTAGGTGGCCTGGGCTGTGGCCTGAAGAACAGGTCCTCAGAGGGCC
CCAGCTCCCCTTCCGGGAAGCTCATGAGCCCCAAGCTGTATGTGTGGGCCAAAGACCGCCCTGAGATCTGGGAGGGAG
AGCCTCCGTGTCTCCCACCGAGGGACAGCCTGAACCAGAGCCTCAGCCAGGACCTCACCATGGCCCCTGGCTCCACAC
TCTGGCTGTCCTGTGGGGTACCCCCTGACTCTGTGTCCAGGGGCCCCCTCTCCTGGACCCATGTGCACCCCAAGGGGC
CTAAGTCATTGCTGAGCCTAGAGCTGAAGGACGATCGCCCGGCCAGAGATATGTGGGTAATGGAGACGGGTCTGTTGT
TGCCCCGGGCCACAGCTCAAGACGCTGGAAAGTATTATTGTCACCGTGGCAACCTGACCATGTCATTCCACCTGGAGA
TCACTGCTCGGCCAGGGGGAGGTGGGTCTGGAGGTGGAGGATCTGGTGGAGGTGGGTCTGGTGGAGGTGGGTCTGAGG
TGCAGCTGGTGGAGTCTGGTGGTGGTCTTGTTCAACCCGGTGGTTCTCTTCGTCTTTCTTGTGCTGCTTCTGGTTTTA
ATATTAAAGATACTTATATTCATTGGGTTCGTCAAGCTCCTGGTAAAGGTCTTGAATGGGTTGCTCGTATTTATCCTA
CTAATGGTTATACTCGTTATGCTGATTCTGTTAAAGGTCGTTTTACTATTTCTGCTGATACTTCTAAAAATACTGCTT
ATCTTCAAATGAACTCTCTTCGTGCTGAAGATACTGCTGTTTATTATTGTTCTCGTTGGGGTGGTGATGGTTTTTATG
CTATGGATTATTGGGGTCAAGGTACTCTTGTCACCGTCTCCTCAGCTAGCACCGGGGGAGGTGGGTCTGGAGGTGGAG
GATCTGGTGGAGGTGGGTCTGACATCCAGATGACCCAGTCTCCTTCTTCTCTTTCTGCTTCTGTTGGTGATCGTGTTA
CTATTACTTGTCGTGCTTCTCAAGATGTTAATACTGCTGTTGCTTGGTATCAACAAAAACCCGGTAAAGCTCCTAAAC
TTCTTATTTATTCTGCTTCTTTTCTTTATTCTGGTGTTCCTTCTCGTTTTTCTGGTTCTCGTTCTGGTACTGATTTTA
CTCTTACTATTTCTTCTCTTCAACCTGAAGATTTTGCTACTTATTATTGTCAACAACATTATACTACTCCTCCTACTT
TTGGTCAAGGTACCAAGGTGGAGATCAAACGTACGCATCATCACCATCACCAT
SEQID NO. 277
GATATCGAATTAGGAGGAAAACTGTTTCATACAGAAGGCGTCAATTAGGAGGAAAAACTGTTTCATACAGAAGGCGTC
AATTAGGAGGAAAAACTGTTTCATACAGAAGGCGTCAATTGGTCCCATCGAATTAGGAGGAAAAACTGTTTCATACAG
AAGGCGTCAATTAGGAGGAAAAACTGTTTCATACAGAAGGCGTCAATTAGGAGGAAAAACTGTTTCATACAGAAGGCG
TCAATTGGTCCCGGGACATTTTGACACCCCCATAATATTTTTCCAGAATTAACAGTATAAATTGCATCTCTTGTTCAA
GAGTTCCCTATCACTCTCTTTAATCACTACTCACAGTAACCTCAACTCCTGGCGGCCGCGCCACCATGCCACCTCCTC
GCCTCCTCTTCTTCCTCCTCTTCCTCACCCCCATGGAAGTCAGGCCCGAGGAACCTCTAGTGGTGAAGGTGGAAGAGG
GAGATAACGCTGTGCTGCAGTGCCTCAAGGGGACCTCAGATGGCCCCACTCAGCAGCTGACTTGGTCTCGGGAGTCCC
CGCTTAAACCCTTCTTAAAACTCAGCCTGGGGCTGCCAGGCCTGGGAATCCACATGAGGCCCCTGGCCATCTGGCTTT
TCATCTTCAACGTCTCTCAACAGATGGGGGGCTTCTACCTGTGCCAGCCGGGGCCCCCCTCTGAGAAGGCCTGGCAGC
CTGGCTGGACAGTCAATGTGGAGGGCAGCGGGGAGCTGTTCCGGTGGAATGTTTCGGACCTAGGTGGCCTGGGCTGTG
GCCTGAAGAACAGGTCCTCAGAGGGCCCCAGCTCCCCTTCCGGGAAGCTCATGAGCCCCAAGCTGTATGTGTGGGCCA
AAGACCGCCCTGAGATCTGGGAGGGAGAGCCTCCGTGTCTCCCACCGAGGGACAGCCTGAACCAGAGCCTCAGCCAGG
ACCTCACCATGGCCCCTGGCTCCACACTCTGGCTGTCCTGTGGGGTACCCCCTGACTCTGTGTCCAGGGGCCCCCTCT
CCTGGACCCATGTGCACCCCAAGGGGCCTAAGTCATTGCTGAGCCTAGAGCTGAAGGACGATCGCCCGGCCAGAGATA
TGTGGGTAATGGAGACGGGTCTGTTGTTGCCCCGGGCCACAGCTCAAGACGCTGGAAAGTATTATTGTCACCGTGGCA
ACCTGACCATGTCATTCCACCTGGAGATCACTGCTCGGCCAGGGGGAGGTGGGTCTGGAGGTGGAGGATCTGGTGGAG
GTGGGTCTGGTGGAGGTGGGTCTGAGGTGCAGCTGGTGGAGTCTGGTGGTGGTCTTGTTCAACCCGGTGGTTCTCTTC
GTCTTTCTTGTGCTGCTTCTGGTTTTAATATTAAAGATACTTATATTCATTGGGTTCGTCAAGCTCCTGGTAAAGGTC
TTGAATGGGTTGCTCGTATTTATCCTACTAATGGTTATACTCGTTATGCTGATTCTGTTAAAGGTCGTTTTACTATTT
CTGCTGATACTTCTAAAAATACTGCTTATCTTCAAATGAACTCTCTTCGTGCTGAAGATACTGCTGTTTATTATTGTT
CTCGTTGGGGTGGTGATGGTTTTTATGCTATGGATTATTGGGGTCAAGGTACTCTTGTCACCGTCTCCTCAGCTAGCA
CCGGGGGAGGTGGGTCTGGAGGTGGAGGATCTGGTGGAGGTGGGTCTGACATCCAGATGACCCAGTCTCCTTCTTCTC
TTTCTGCTTCTGTTGGTGATCGTGTTACTATTACTTGTCGTGCTTCTCAAGATGTTAATACTGCTGTTGCTTGGTATC
AACAAAAACCCGGTAAAGCTCCTAAACTTCTTATTTATTCTGCTTCTTTTCTTTATTCTGGTGTTCCTTCTCGTTTTT
CTGGTTCTCGTTCTGGTACTGATTTTACTCTTACTATTTCTTCTCTTCAACCTGAAGATTTTGCTACTTATTATTGTC
AACAACATTATACTACTCCTCCTACTTTTGGTCAAGGTACCAAGGTGGAGATCAAACGTACGCATCATCACCATCACC
AT
SEQID NO. 278
ATGGATTTTCAGGTGCAGATTTTCAGCTTCCTGCTAATCAGTGCCTCAGTCATAATGTCTAGAATGGCCCAGGTCAAA
CTACAGGAGTCAGGGGCTGAGCTGGTGAAGCCTGGGGCCTCAGTGAAGATGTCCTGCAAGGCTTCTGGCTACACATTT
ACCAGTTACAATATGCACTGGGTAAAGCAGACACCTGGACAGGGCCTGGAATGGATTGGAGCTATTTATCCAGGAAAT
GGTGATACTTCCTACAATCAGAAGTTCAAAGGCAAGGCCACATTGACTGCAGACAAATCCTCCAGCACAGCCTACATG
CAGCTCAGCAGCCTGACATCTGAGGACTCTGCGGACTATTACTGTGCAAGATCTAATTATTACGGTAGTAGCTACTGG
TTCTTCGATGTCTGGGGCCAAGGGACCACGGTCACCGTCTCCTCAGGTGGAGGCGGTTCAGGCGGAGGTGGCTCTGGC
GGTGGCGGATCGGACATCGAGCTCACTCAGTCTCCAACAATCCTGTCTGCATCTCCAGGGGAGAAGGTCACAATGACT
TGCAGGGCCAGCTCAAGTGTAAATTACATGGACTGGTACCAGAAGAAGCCAGGATCCTCCCCCAAACCCTGGATTTAT
GCCACATCCAACCTGGCTTCTGGAGTCCCTGCTCGCTTCAGTGGCAGTGGGTCTGGGACCTCTTACTCTCTCACAATC
AGCAGAGTGGAGGCTGAAGATGCTGCCACTTATTACTGCCAGCAGTGGAGTTTTAATCCACCCACGTTCGGAGGGGGG
ACAAAGTTGGAAATAAAACGGGCCGCCGCTGGTGATCCCGCCGAGCCCAAATCTCCTGACAAAACTCACACATGCCCA
CCGTGCCCAGCACCTGAACTCCTGGGGGGACCGTCAGTCTTCCTCTTCCCCCCAAAACCCAAGGACACCCTCATGATC
TCCCGGACCCCTGAGGTCACATGCGTGGTGGTGGACGTGAGCCACGAAGACCCTGAGGTCAAGTTCAACTGGTACGTG
GACGGCGTGGAGGTGCATAATGCCAAGACAAAGCCGCGGGAGGAGCAGTACAACAGCACGTACCGTGTGGTCAGCGTC
CTCACCGTCCTGCACCAGGACTGGCTGAATGGCAAGGAGTACAAGTGCAAGGTCTCCAACAAAGCCCTCCCAGCCCCC
ATCGAGAAAACCATCTCCAAAGCCAAAGGGCAGCCCCGAGAACCACAGGTGTACACCCTGCCCCCATCCCGGGAGGAG
ATGACCAAGAACCAGGTCAGCCTGACCTGCCTGGTCAAAGGCTTCTATCCCAGCGACATCGCCGTGGAGTGGGAGAGC
AATGGGCAGCCGGAGAACAACTACAAGACCACGCCTCCCGTGCTGGACTCCGACGGCTCCTTCTTCCTCTACAGCAAG
CTCACCGTGGACAAGAGCAGGTGGCAGCAGGGGAACGTCTTCTCATGCTCCGTGATGCACGAGGCTCTGCACAACCAC
TACACGCAGAAGAGCCTCTCCCTGTCTCCGGGT
SEQID NO. 279
ATGGATTTTCAGGTGCAGATTTTCAGCTTCCTGCTAATCAGTGCCTCAGTCATAATGTCTAGAATGGCCCAGGTCAAA
CTACAGGAGTCAGGGGCTGAGCTGGTGAAGCCTGGGGCCTCAGTGAAGATGTCCTGCAAGGCTTCTGGCTACACATTT
ACCAGTTACAATATGCACTGGGTAAAGCAGACACCTGGACAGGGCCTGGAATGGATTGGAGCTATTTATCCAGGAAAT
GGTGATACTTCCTACAATCAGAAGTTCAAAGGCAAGGCCACATTGACTGCAGACAAATCCTCCAGCACAGCCTACATG
CAGCTCAGCAGCCTGACATCTGAGGACTCTGCGGACTATTACTGTGCAAGATCTAATTATTACGGTAGTAGCTACTGG
TTCTTCGATGTCTGGGGCCAAGGGACCACGGTCACCGTCTCCTCAGGTGGAGGCGGTTCAGGCGGAGGTGGCTCTGGC
GGTGGCGGATCGGACATCGAGCTCACTCAGTCTCCAACAATCCTGTCTGCATCTCCAGGGGAGAAGGTCACAATGACT
TGCAGGGCCAGCTCAAGTGTAAATTACATGGACTGGTACCAGAAGAAGCCAGGATCCTCCCCCAAACCCTGGATTTAT
GCCACATCCAACCTGGCTTCTGGAGTCCCTGCTCGCTTCAGTGGCAGTGGGTCTGGGACCTCTTACTCTCTCACAATC
AGCAGAGTGGAGGCTGAAGATGCTGCCACTTATTACTGCCAGCAGTGGAGTTTTAATCCACCCACGTTCGGAGGGGGG
ACAAAGTTGGAAATAAAACGGGCCGCCGCTCATCATCACCATCACCAT
SEQID NO. 280
ATGGATTTTCAGGTGCAGATTTTCAGCTTCCTGCTAATCAGTGCCTCAGTCATAATGTCTAGAGACATCGAGCTCACT
CAGTCTCCAACAATCCTGTCTGCATCTCCAGGGGAGAAGGTCACAATGACTTGCAGGGCCAGCTCAAGTGTAAATTAC
ATGGACTGGTACCAGAAGAAGCCAGGATCCTCCCCCAAACCCTGGATTTATGCCACATCCAACCTGGCTTCTGGAGTC
CCTGCTCGCTTCAGTGGCAGTGGGTCTGGGACCTCTTACTCTCTCACAATCAGCAGAGTGGAGGCTGAAGATGCTGCC
ACTTATTACTGCCAGCAGTGGAGTTTTAATCCACCCACGTTCGGAGGGGGGACAAAGTTGGAAATAAAACGGGGTGGA
GGCGGTTCAGGCGGAGGTGGCTCTGGCGGTGGCGGATCGATGGCCCAGGTCAAACTACAGGAGTCAGGGGCTGAGCTG
GTGAAGCCTGGGGCCTCAGTGAAGATGTCCTGCAAGGCTTCTGGCTACACATTTACCAGTTACAATATGCACTGGGTA
AAGCAGACACCTGGACAGGGCCTGGAATGGATTGGAGCTATTTATCCAGGAAATGGTGATACTTCCTACAATCAGAAG
TTCAAAGGCAAGGCCACATTGACTGCAGACAAATCCTCCAGCACAGCCTACATGCAGCTCAGCAGCCTGACATCTGAG
GACTCTGCGGACTATTACTGTGCAAGATCTAATTATTACGGTAGTAGCTACTGGTTCTTCGATGTCTGGGGCCAAGGG
ACCACGGTCACCGTCTCCTCAGCCGCCGCTGGTGATCCCGCCGAGCCCAAATCTCCTGACAAAACTCACACATGCCCA
CCGTGCCCAGCACCTGAACTCCTGGGGGGACCGTCAGTCTTCCTCTTCCCCCCAAAACCCAAGGACACCCTCATGATC
TCCCGGACCCCTGAGGTCACATGCGTGGTGGTGGACGTGAGCCACGAAGACCCTGAGGTCAAGTTCAACTGGTACGTG
GACGGCGTGGAGGTGCATAATGCCAAGACAAAGCCGCGGGAGGAGCAGTACAACAGCACGTACCGTGTGGTCAGCGTC
CTCACCGTCCTGCACCAGGACTGGCTGAATGGCAAGGAGTACAAGTGCAAGGTCTCCAACAAAGCCCTCCCAGCCCCC
ATCGAGAAAACCATCTCCAAAGCCAAAGGGCAGCCCCGAGAACCACAGGTGTACACCCTGCCCCCATCCCGGGAGGAG
ATGACCAAGAACCAGGTCAGCCTGACCTGCCTGGTCAAAGGCTTCTATCCCAGCGACATCGCCGTGGAGTGGGAGAGC
AATGGGCAGCCGGAGAACAACTACAAGACCACGCCTCCCGTGCTGGACTCCGACGGCTCCTTCTTCCTCTACAGCAAG
CTCACCGTGGACAAGAGCAGGTGGCAGCAGGGGAACGTCTTCTCATGCTCCGTGATGCACGAGGCTCTGCACAACCAC
TACACGCAGAAGAGCCTCTCCCTGTCTCCGGGT
SEQID NO. 281
ATGGATTTTCAGGTGCAGATTTTCAGCTTCCTGCTAATCAGTGCCTCAGTCATAATGTCTAGAGACATCGAGCTCACT
CAGTCTCCAACAATCCTGTCTGCATCTCCAGGGGAGAAGGTCACAATGACTTGCAGGGCCAGCTCAAGTGTAAATTAC
ATGGACTGGTACCAGAAGAAGCCAGGATCCTCCCCCAAACCCTGGATTTATGCCACATCCAACCTGGCTTCTGGAGTC
CCTGCTCGCTTCAGTGGCAGTGGGTCTGGGACCTCTTACTCTCTCACAATCAGCAGAGTGGAGGCTGAAGATGCTGCC
ACTTATTACTGCCAGCAGTGGAGTTTTAATCCACCCACGTTCGGAGGGGGGACAAAGTTGGAAATAAAACGGGGTGGA
GGCGGTTCAGGCGGAGGTGGCTCTGGCGGTGGCGGATCGATGGCCCAGGTCAAACTACAGGAGTCAGGGGCTGAGCTG
GTGAAGCCTGGGGCCTCAGTGAAGATGTCCTGCAAGGCTTCTGGCTACACATTTACCAGTTACAATATGCACTGGGTA
AAGCAGACACCTGGACAGGGCCTGGAATGGATTGGAGCTATTTATCCAGGAAATGGTGATACTTCCTACAATCAGAAG
TTCAAAGGCAAGGCCACATTGACTGCAGACAAATCCTCCAGCACAGCCTACATGCAGCTCAGCAGCCTGACATCTGAG
GACTCTGCGGACTATTACTGTGCAAGATCTAATTATTACGGTAGTAGCTACTGGTTCTTCGATGTCTGGGGCCAAGGG
ACCACGGTCACCGTCTCCTCAGCCGCCGCTCATCATCACCATCACCAT
SEQID NO. 282
ATGCCACCTCCTCGCCTCCTCTTCTTCCTCCTCTTCCTCACCCCCATGGAAGTCAGGCCCGAGGAACCTCTAGTGGTG
AAGGTGGAAGAGGGAGATAACGCTGTGCTGCAGTGCCTCAAGGGGACCTCAGATGGCCCCACTCAGCAGCTGACCTGG
TCTCGGGAGTCCCCGCTTAAACCCTTCTTAAAACTCAGCCTGGGGCTGCCAGGCCTGGGAATCCACATGAGGCCCCTG
GCCATCTGGCTTTTCATCTTCAACGTCTCTCAACAGATGGGGGGCTTCTACCTGTGCCAGCCGGGGCCCCCCTCTGAG
AAGGCCTGGCAGCCTGGCTGGACAGTCAATGTGGAGGGCAGCGGGGAGCTGTTCCGGTGGAATGTTTCGGACCTAGGT
GGCCTGGGCTGTGGCCTGAAGAACAGGTCCTCAGAGGGCCCCAGCTCCCCTTCCGGGAAGCTCATGAGCCCCAAGCTG
TATGTGTGGGCCAAAGACCGCCCTGAGATCTGGGAGGGAGAGCCTCCGTGTCTCCCACCGAGGGACAGCCTGAACCAG
AGCCTCAGCCAGGACCTCACCATGGCCCCTGGCTCCACACTCTGGCTGTCCTGTGGGGTACCCCCTGACTCTGTGTCC
AGGGGCCCCCTCTCCTGGACCCATGTGCACCCCAAGGGGCCTAAGTCATTGCTGAGCCTAGAGCTGAAGGACGATCGC
CCGGCCAGAGATATGTGGGTAATGGAGACGGGTCTGTTGTTGCCCCGGGCCACAGCTCAAGACGCTGGAAAGTATTAT
TGTCACCGTGGCAACCTGACCATGTCATTCCACCTGGAGATCACTGCTCGGCCAGGAGGAGGTGGGTCTGGAGGTGGA
GGATCTGGTGGAGGTGGGTCTGGAGGAGGTGGGTCTATGGCCCAGGTCAAACTACAGGAGTCAGGGGCTGAGCTGGTG
AAGCCTGGGGCCTCAGTGAAGATGTCCTGCAAGGCTTCTGGCTACACATTTACCAGTTACAATATGCACTGGGTAAAG
CAGACACCTGGACAGGGCCTGGAATGGATTGGAGCTATTTATCCAGGAAATGGTGATACTTCCTACAATCAGAAGTTC
AAAGGCAAGGCCACATTGACTGCAGACAAATCCTCCAGCACAGCCTACATGCAGCTCAGCAGCCTGACATCTGAGGAC
TCTGCGGACTATTACTGTGCAAGATCTAATTATTACGGTAGTAGCTACTGGTTCTTCGATGTCTGGGGCCAAGGGACC
ACGGTCACCGTCTCCTCAGGTGGAGGCGGTTCAGGCGGAGGTGGCTCTGGCGGTGGCGGATCGGACATCGAGCTCACT
CAGTCTCCAACAATCCTGTCTGCATCTCCAGGGGAGAAGGTCACAATGACTTGCAGGGCCAGCTCAAGTGTAAATTAC
ATGGACTGGTACCAGAAGAAGCCAGGATCCTCCCCCAAACCCTGGATTTATGCCACATCCAACCTGGCTTCTGGAGTC
CCTGCTCGCTTCAGTGGCAGTGGGTCTGGGACCTCTTACTCTCTCACAATCAGCAGAGTGGAGGCTGAAGATGCTGCC
ACTTATTACTGCCAGCAGTGGAGTTTTAATCCACCCACGTTCGGAGGGGGGACAAAGTTGGAAATAAAACGGGCCGCC
GCTGGTGATCCCGCCGAGCCCAAATCTCCTGACAAAACTCACACATGCCCACCGTGCCCAGCACCTGAACTCCTGGGG
GGACCGTCAGTCTTCCTCTTCCCCCCAAAACCCAAGGACACCCTCATGATCTCCCGGACCCCTGAGGTCACATGCGTG
GTGGTGGACGTGAGCCACGAAGACCCTGAGGTCAAGTTCAACTGGTACGTGGACGGCGTGGAGGTGCATAATGCCAAG
ACAAAGCCGCGGGAGGAGCAGTACAACAGCACGTACCGTGTGGTCAGCGTCCTCACCGTCCTGCACCAGGACTGGCTG
AATGGCAAGGAGTACAAGTGCAAGGTCTCCAACAAAGCCCTCCCAGCCCCCATCGAGAAAACCATCTCCAAAGCCAAA
GGGCAGCCCCGAGAACCACAGGTGTACACCCTGCCCCCATCCCGGGAGGAGATGACCAAGAACCAGGTCAGCCTGACC
TGCCTGGTCAAAGGCTTCTATCCCAGCGACATCGCCGTGGAGTGGGAGAGCAATGGGCAGCCGGAGAACAACTACAAG
ACCACGCCTCCCGTGCTGGACTCCGACGGCTCCTTCTTCCTCTACAGCAAGCTCACCGTGGACAAGAGCAGGTGGCAG
CAGGGGAACGTCTTCTCATGCTCCGTGATGCACGAGGCTCTGCACAACCACTACACGCAGAAGAGCCTCTCCCTGTCT
CCGGGT
SEQID NO. 283
ATGCCACCTCCTCGCCTCCTCTTCTTCCTCCTCTTCCTCACCCCCATGGAAGTCAGGCCCGAGGAACCTCTAGTGGTG
AAGGTGGAAGAGGGAGATAACGCTGTGCTGCAGTGCCTCAAGGGGACCTCAGATGGCCCCACTCAGCAGCTGACCTGG
TCTCGGGAGTCCCCGCTTAAACCCTTCTTAAAACTCAGCCTGGGGCTGCCAGGCCTGGGAATCCACATGAGGCCCCTG
GCCATCTGGCTTTTCATCTTCAACGTCTCTCAACAGATGGGGGGCTTCTACCTGTGCCAGCCGGGGCCCCCCTCTGAG
AAGGCCTGGCAGCCTGGCTGGACAGTCAATGTGGAGGGCAGCGGGGAGCTGTTCCGGTGGAATGTTTCGGACCTAGGT
GGCCTGGGCTGTGGCCTGAAGAACAGGTCCTCAGAGGGCCCCAGCTCCCCTTCCGGGAAGCTCATGAGCCCCAAGCTG
TATGTGTGGGCCAAAGACCGCCCTGAGATCTGGGAGGGAGAGCCTCCGTGTCTCCCACCGAGGGACAGCCTGAACCAG
AGCCTCAGCCAGGACCTCACCATGGCCCCTGGCTCCACACTCTGGCTGTCCTGTGGGGTACCCCCTGACTCTGTGTCC
AGGGGCCCCCTCTCCTGGACCCATGTGCACCCCAAGGGGCCTAAGTCATTGCTGAGCCTAGAGCTGAAGGACGATCGC
CCGGCCAGAGATATGTGGGTAATGGAGACGGGTCTGTTGTTGCCCCGGGCCACAGCTCAAGACGCTGGAAAGTATTAT
TGTCACCGTGGCAACCTGACCATGTCATTCCACCTGGAGATCACTGCTCGGCCAGGAGGAGGTGGGTCTGGAGGTGGA
GGATCTGGTGGAGGTGGGTCTGGAGGAGGTGGGTCTATGGCCCAGGTCAAACTACAGGAGTCAGGGGCTGAGCTGGTG
AAGCCTGGGGCCTCAGTGAAGATGTCCTGCAAGGCTTCTGGCTACACATTTACCAGTTACAATATGCACTGGGTAAAG
CAGACACCTGGACAGGGCCTGGAATGGATTGGAGCTATTTATCCAGGAAATGGTGATACTTCCTACAATCAGAAGTTC
AAAGGCAAGGCCACATTGACTGCAGACAAATCCTCCAGCACAGCCTACATGCAGCTCAGCAGCCTGACATCTGAGGAC
TCTGCGGACTATTACTGTGCAAGATCTAATTATTACGGTAGTAGCTACTGGTTCTTCGATGTCTGGGGCCAAGGGACC
ACGGTCACCGTCTCCTCAGGTGGAGGCGGTTCAGGCGGAGGTGGCTCTGGCGGTGGCGGATCGGACATCGAGCTCACT
CAGTCTCCAACAATCCTGTCTGCATCTCCAGGGGAGAAGGTCACAATGACTTGCAGGGCCAGCTCAAGTGTAAATTAC
ATGGACTGGTACCAGAAGAAGCCAGGATCCTCCCCCAAACCCTGGATTTATGCCACATCCAACCTGGCTTCTGGAGTC
CCTGCTCGCTTCAGTGGCAGTGGGTCTGGGACCTCTTACTCTCTCACAATCAGCAGAGTGGAGGCTGAAGATGCTGCC
ACTTATTACTGCCAGCAGTGGAGTTTTAATCCACCCACGTTCGGAGGGGGGACAAAGTTGGAAATAAAACGGGCCGCC
GCTCATCATCACCATCACCAT
SEQID NO. 284
ATGCCACCTCCTCGCCTCCTCTTCTTCCTCCTCTTCCTCACCCCCATGGAAGTCAGGCCCGAGGAACCTCTAGTGGTG
AAGGTGGAAGAGGGAGATAACGCTGTGCTGCAGTGCCTCAAGGGGACCTCAGATGGCCCCACTCAGCAGCTGACCTGG
TCTCGGGAGTCCCCGCTTAAACCCTTCTTAAAACTCAGCCTGGGGCTGCCAGGCCTGGGAATCCACATGAGGCCCCTG
GCCATCTGGCTTTTCATCTTCAACGTCTCTCAACAGATGGGGGGCTTCTACCTGTGCCAGCCGGGGCCCCCCTCTGAG
AAGGCCTGGCAGCCTGGCTGGACAGTCAATGTGGAGGGCAGCGGGGAGCTGTTCCGGTGGAATGTTTCGGACCTAGGT
GGCCTGGGCTGTGGCCTGAAGAACAGGTCCTCAGAGGGCCCCAGCTCCCCTTCCGGGAAGCTCATGAGCCCCAAGCTG
TATGTGTGGGCCAAAGACCGCCCTGAGATCTGGGAGGGAGAGCCTCCGTGTCTCCCACCGAGGGACAGCCTGAACCAG
AGCCTCAGCCAGGACCTCACCATGGCCCCTGGCTCCACACTCTGGCTGTCCTGTGGGGTACCCCCTGACTCTGTGTCC
AGGGGCCCCCTCTCCTGGACCCATGTGCACCCCAAGGGGCCTAAGTCATTGCTGAGCCTAGAGCTGAAGGACGATCGC
CCGGCCAGAGATATGTGGGTAATGGAGACGGGTCTGTTGTTGCCCCGGGCCACAGCTCAAGACGCTGGAAAGTATTAT
TGTCACCGTGGCAACCTGACCATGTCATTCCACCTGGAGATCACTGCTCGGCCAGGAGGAGGTGGGTCTGGAGGTGGA
GGATCTGGTGGAGGTGGGTCTGGAGGAGGTGGGTCTGACATCGAGCTCACTCAGTCTCCAACAATCCTGTCTGCATCT
CCAGGGGAGAAGGTCACAATGACTTGCAGGGCCAGCTCAAGTGTAAATTACATGGACTGGTACCAGAAGAAGCCAGGA
TCCTCCCCCAAACCCTGGATTTATGCCACATCCAACCTGGCTTCTGGAGTCCCTGCTCGCTTCAGTGGCAGTGGGTCT
GGGACCTCTTACTCTCTCACAATCAGCAGAGTGGAGGCTGAAGATGCTGCCACTTATTACTGCCAGCAGTGGAGTTTT
AATCCACCCACGTTCGGAGGGGGGACAAAGTTGGAAATAAAACGGGGTGGAGGCGGTTCAGGCGGAGGTGGCTCTGGC
GGTGGCGGATCGATGGCCCAGGTCAAACTACAGGAGTCAGGGGCTGAGCTGGTGAAGCCTGGGGCCTCAGTGAAGATG
TCCTGCAAGGCTTCTGGCTACACATTTACCAGTTACAATATGCACTGGGTAAAGCAGACACCTGGACAGGGCCTGGAA
TGGATTGGAGCTATTTATCCAGGAAATGGTGATACTTCCTACAATCAGAAGTTCAAAGGCAAGGCCACATTGACTGCA
GACAAATCCTCCAGCACAGCCTACATGCAGCTCAGCAGCCTGACATCTGAGGACTCTGCGGACTATTACTGTGCAAGA
TCTAATTATTACGGTAGTAGCTACTGGTTCTTCGATGTCTGGGGCCAAGGGACCACGGTCACCGTCTCCTCAGCCGCC
GCTGGTGATCCCGCCGAGCCCAAATCTCCTGACAAAACTCACACATGCCCACCGTGCCCAGCACCTGAACTCCTGGGG
GGACCGTCAGTCTTCCTCTTCCCCCCAAAACCCAAGGACACCCTCATGATCTCCCGGACCCCTGAGGTCACATGCGTG
GTGGTGGACGTGAGCCACGAAGACCCTGAGGTCAAGTTCAACTGGTACGTGGACGGCGTGGAGGTGCATAATGCCAAG
ACAAAGCCGCGGGAGGAGCAGTACAACAGCACGTACCGTGTGGTCAGCGTCCTCACCGTCCTGCACCAGGACTGGCTG
AATGGCAAGGAGTACAAGTGCAAGGTCTCCAACAAAGCCCTCCCAGCCCCCATCGAGAAAACCATCTCCAAAGCCAAA
GGGCAGCCCCGAGAACCACAGGTGTACACCCTGCCCCCATCCCGGGAGGAGATGACCAAGAACCAGGTCAGCCTGACC
TGCCTGGTCAAAGGCTTCTATCCCAGCGACATCGCCGTGGAGTGGGAGAGCAATGGGCAGCCGGAGAACAACTACAAG
ACCACGCCTCCCGTGCTGGACTCCGACGGCTCCTTCTTCCTCTACAGCAAGCTCACCGTGGACAAGAGCAGGTGGCAG
CAGGGGAACGTCTTCTCATGCTCCGTGATGCACGAGGCTCTGCACAACCACTACACGCAGAAGAGCCTCTCCCTGTCT
CCGGGT
SEQID NO. 285
ATGCCACCTCCTCGCCTCCTCTTCTTCCTCCTCTTCCTCACCCCCATGGAAGTCAGGCCCGAGGAACCTCTAGTGGTG
AAGGTGGAAGAGGGAGATAACGCTGTGCTGCAGTGCCTCAAGGGGACCTCAGATGGCCCCACTCAGCAGCTGACCTGG
TCTCGGGAGTCCCCGCTTAAACCCTTCTTAAAACTCAGCCTGGGGCTGCCAGGCCTGGGAATCCACATGAGGCCCCTG
GCCATCTGGCTTTTCATCTTCAACGTCTCTCAACAGATGGGGGGCTTCTACCTGTGCCAGCCGGGGCCCCCCTCTGAG
AAGGCCTGGCAGCCTGGCTGGACAGTCAATGTGGAGGGCAGCGGGGAGCTGTTCCGGTGGAATGTTTCGGACCTAGGT
GGCCTGGGCTGTGGCCTGAAGAACAGGTCCTCAGAGGGCCCCAGCTCCCCTTCCGGGAAGCTCATGAGCCCCAAGCTG
TATGTGTGGGCCAAAGACCGCCCTGAGATCTGGGAGGGAGAGCCTCCGTGTCTCCCACCGAGGGACAGCCTGAACCAG
AGCCTCAGCCAGGACCTCACCATGGCCCCTGGCTCCACACTCTGGCTGTCCTGTGGGGTACCCCCTGACTCTGTGTCC
AGGGGCCCCCTCTCCTGGACCCATGTGCACCCCAAGGGGCCTAAGTCATTGCTGAGCCTAGAGCTGAAGGACGATCGC
CCGGCCAGAGATATGTGGGTAATGGAGACGGGTCTGTTGTTGCCCCGGGCCACAGCTCAAGACGCTGGAAAGTATTAT
TGTCACCGTGGCAACCTGACCATGTCATTCCACCTGGAGATCACTGCTCGGCCAGGAGGAGGTGGGTCTGGAGGTGGA
GGATCTGGTGGAGGTGGGTCTGGAGGAGGTGGGTCTGACATCGAGCTCACTCAGTCTCCAACAATCCTGTCTGCATCT
CCAGGGGAGAAGGTCACAATGACTTGCAGGGCCAGCTCAAGTGTAAATTACATGGACTGGTACCAGAAGAAGCCAGGA
TCCTCCCCCAAACCCTGGATTTATGCCACATCCAACCTGGCTTCTGGAGTCCCTGCTCGCTTCAGTGGCAGTGGGTCT
GGGACCTCTTACTCTCTCACAATCAGCAGAGTGGAGGCTGAAGATGCTGCCACTTATTACTGCCAGCAGTGGAGTTTT
AATCCACCCACGTTCGGAGGGGGGACAAAGTTGGAAATAAAACGGGGTGGAGGCGGTTCAGGCGGAGGTGGCTCTGGC
GGTGGCGGATCGATGGCCCAGGTCAAACTACAGGAGTCAGGGGCTGAGCTGGTGAAGCCTGGGGCCTCAGTGAAGATG
TCCTGCAAGGCTTCTGGCTACACATTTACCAGTTACAATATGCACTGGGTAAAGCAGACACCTGGACAGGGCCTGGAA
TGGATTGGAGCTATTTATCCAGGAAATGGTGATACTTCCTACAATCAGAAGTTCAAAGGCAAGGCCACATTGACTGCA
GACAAATCCTCCAGCACAGCCTACATGCAGCTCAGCAGCCTGACATCTGAGGACTCTGCGGACTATTACTGTGCAAGA
TCTAATTATTACGGTAGTAGCTACTGGTTCTTCGATGTCTGGGGCCAAGGGACCACGGTCACCGTCTCCTCAGCCGCC
GCTCATCATCACCATCACCAT
SEQID NO. 286
ATGCCACCTCCTCGCCTCCTCTTCTTCCTCCTCTTCCTCACCCCCATGGAAGTCAGGCCCGAGGAACCTCTAGTGGTG
AAGGTGGAAGAGGGAGATAACGCTGTGCTGCAGTGCCTCAAGGGGACCTCAGATGGCCCCACTCAGCAGCTGACCTGG
TCTCGGGAGTCCCCGCTTAAACCCTTCTTAAAACTCAGCCTGGGGCTGCCAGGCCTGGGAATCCACATGAGGCCCCTG
GCCATCTGGCTTTTCATCTTCAACGTCTCTCAACAGATGGGGGGCTTCTACCTGTGCCAGCCGGGGCCCCCCTCTGAG
AAGGCCTGGCAGCCTGGCTGGACAGTCAATGTGGAGGGCAGCGGGGAGCTGTTCCGGTGGAATGTTTCGGACCTAGGT
GGCCTGGGCTGTGGCCTGAAGAACAGGTCCTCAGAGGGCCCCAGCTCCCCTTCCGGGAAGCTCATGAGCCCCAAGCTG
TATGTGTGGGCCAAAGACCGCCCTGAGATCTGGGAGGGAGAGCCTCCGTGTCTCCCACCGAGGGACAGCCTGAACCAG
AGCCTCAGCCAGGACCTCACCATGGCCCCTGGCTCCACACTCTGGCTGTCCTGTGGGGTACCCCCTGACTCTGTGTCC
AGGGGCCCCCTCTCCTGGACCCATGTGCACCCCAAGGGGCCTAAGTCATTGCTGAGCCTAGAGCTGAAGGACGATCGC
CCGGCCAGAGATATGTGGGTAATGGAGACGGGTCTGTTGTTGCCCCGGGCCACAGCTCAAGACGCTGGAAAGTATTAT
TGTCACCGTGGCAACCTGACCATGTCATTCCACCTGGAGATCACTGCTCGGCCAGGAGGAGGTGGGTCTGGAGGTGGA
GGATCTGGTGGAGGTGGGTCTGGAGGAGGTGGGTCTCAGGTGCAGCTGGTGCAGAGCGGCGCCGAGGACAAGAAGCCC
GGCGAGAGCGTGAAGATCAGCTGCAAGGCCAGCGGCTACACCTTCACCAACTACGGCATGAACTGGGTGAGGCAGGCC
CCCGGCCAGGGCCTGAAGTGGATGGGCTGGATCAACACCTACACCGGCGAGAGCACCTACGCCGACGACTTCAAGGGC
AGGTTCGCCTTCAGCCTGGACACCAGCGCCAGCACCGCCTACCTGCAGCTGAGCAGCCTGAGGGGCGAGGACACCGCC
GTGTACTTCTGCGCCAGGTTCGCCATCAAGGGCGACTACTGGGGCCAGGGCACCACCGTGACCGTGAGCAGCGCCAGC
ACCGGCGGCGGCGGCAGCGGCGGCGGCGGCAGCGGCGGCGGCGGCAGCGGCGGCGGCGGCAGCGACATCGTGATGACC
CAGAGCCCCCTGAGCCTGGAGGTGAGCCCCGGCGAGCCCGCCAGCATCAGCTGCAGGAGCACCAAGAGCCTGCTGCAC
AGCGACGGCATCACCTACCTGTACTGGTACCTGCAGAAGCCCGGCCAGAGCCCCCAGCTGCTGATCTACCAGCTGAGC
AACCTGGCCAGCGGCGTGCCCGACAGGTTCAGCAGCAGCGGCAGCGGCACCGACTTCACCCTGAAGATCAGCAGGGTG
GAGGCCGAGGACGAGGGCACCTACTACTGCGCCCAGAACCTGGAGATCCCCAGGACCTTCGGCCAGGGCACCAAGCTG
GAGATCAAGAGGACCCATCATCACCATCACCAT
SEQID NO. 287
ATGCCACCTCCTCGCCTCCTCTTCTTCCTCCTCTTCCTCACCCCCATGGAAGTCAGGCCCGAGGAACCTCTAGTGGTG
AAGGTGGAAGAGGGAGATAACGCTGTGCTGCAGTGCCTCAAGGGGACCTCAGATGGCCCCACTCAGCAGCTGACCTGG
TCTCGGGAGTCCCCGCTTAAACCCTTCTTAAAACTCAGCCTGGGGCTGCCAGGCCTGGGAATCCACATGAGGCCCCTG
GCCATCTGGCTTTTCATCTTCAACGTCTCTCAACAGATGGGGGGCTTCTACCTGTGCCAGCCGGGGCCCCCCTCTGAG
AAGGCCTGGCAGCCTGGCTGGACAGTCAATGTGGAGGGCAGCGGGGAGCTGTTCCGGTGGAATGTTTCGGACCTAGGT
GGCCTGGGCTGTGGCCTGAAGAACAGGTCCTCAGAGGGCCCCAGCTCCCCTTCCGGGAAGCTCATGAGCCCCAAGCTG
TATGTGTGGGCCAAAGACCGCCCTGAGATCTGGGAGGGAGAGCCTCCGTGTCTCCCACCGAGGGACAGCCTGAACCAG
AGCCTCAGCCAGGACCTCACCATGGCCCCTGGCTCCACACTCTGGCTGTCCTGTGGGGTACCCCCTGACTCTGTGTCC
AGGGGCCCCCTCTCCTGGACCCATGTGCACCCCAAGGGGCCTAAGTCATTGCTGAGCCTAGAGCTGAAGGACGATCGC
CCGGCCAGAGATATGTGGGTAATGGAGACGGGTCTGTTGTTGCCCCGGGCCACAGCTCAAGACGCTGGAAAGTATTAT
TGTCACCGTGGCAACCTGACCATGTCATTCCACCTGGAGATCACTGCTCGGCCAGGAGGAGGTGGGTCTGGAGGTGGA
GGATCTGGTGGAGGTGGGTCTGGAGGAGGTGGGTCTCAGGTTCAGCTGGTGCAGTCTGGTGCTGAGGATGTGAAGCCT
GATGCCTCAGTGAAGCTCTCCTGCAAGGCTTCTGGTTACACATTCACTGACTACTACATGCACTGGGTGCGTCAGGCC
CCTGGTCAAGGTCTTGAGTGGATGGGTCGTGTTAATCCTAACCGGAGGGGTACTACCTACAACCAGAAATTCGAGGGC
CGTGTCACCATGACCACAGACACATCCACGAGCACAGCCTACATGCAGCTGAGTAGCCTGCGTGGTGAAGACACGGCC
GTGTATTACTGTGCGCGTGCGAACTGGCTTGACTACTGGGGCCAGGGCACCACCGTCACCGTCTCCTCCGCCTCCACC
GGGGGAGGTGGGTCTGGAGGTGGAGGATCTGGTGGAGGTGGGTCTGGTGGAGGTGGGTCTGACATCCAGATGACCCAG
TCTCCATCCTCCCTGGAGGCATCTGTAGGAGACAGAGTCACCATCACTTGCAGTGTCAGCTCAAGTGTATCCTCCATT
TACTTGCACTGGTATCAGCAGAAACCAGGGAAAAGCCCTAAGCTCCTGATCTATAGCACATCCAACTTGGCTTCTGGA
GTCCCAGATAGGTTCAGTGGCAGTGGATCTGGGACAGATTTCACTCTCACCATCAGCAGTCTGCAAGCCGAAGATGAG
GGCACTTACTACTGTCAAGTCTACAGTGGTTACCCGCTCACGTTCGGCGGAGGGACCAAGCTGGAGATCAAACGAACT
CATCATCACCATCACCAT
SEQID NO. 288
ATGCCACCTCCTCGCCTCCTCTTCTTCCTCCTCTTCCTCACCCCCATGGAAGTCAGGCCCGAGGAACCTCTAGTGGTG
AAGGTGGAAGAGGGAGATAACGCTGTGCTGCAGTGCCTCAAGGGGACCTCAGATGGCCCCACTCAGCAGCTGACCTGG
TCTCGGGAGTCCCCGCTTAAACCCTTCTTAAAACTCAGCCTGGGGCTGCCAGGCCTGGGAATCCACATGAGGCCCCTG
GCCATCTGGCTTTTCATCTTCAACGTCTCTCAACAGATGGGGGGCTTCTACCTGTGCCAGCCGGGGCCCCCCTCTGAG
AAGGCCTGGCAGCCTGGCTGGACAGTCAATGTGGAGGGCAGCGGGGAGCTGTTCCGGTGGAATGTTTCGGACCTAGGT
GGCCTGGGCTGTGGCCTGAAGAACAGGTCCTCAGAGGGCCCCAGCTCCCCTTCCGGGAAGCTCATGAGCCCCAAGCTG
TATGTGTGGGCCAAAGACCGCCCTGAGATCTGGGAGGGAGAGCCTCCGTGTCTCCCACCGAGGGACAGCCTGAACCAG
AGCCTCAGCCAGGACCTCACCATGGCCCCTGGCTCCACACTCTGGCTGTCCTGTGGGGTACCCCCTGACTCTGTGTCC
AGGGGCCCCCTCTCCTGGACCCATGTGCACCCCAAGGGGCCTAAGTCATTGCTGAGCCTAGAGCTGAAGGACGATCGC
CCGGCCAGAGATATGTGGGTAATGGAGACGGGTCTGTTGTTGCCCCGGGCCACAGCTCAAGACGCTGGAAAGTATTAT
TGTCACCGTGGCAACCTGACCATGTCATTCCACCTGGAGATCACTGCTCGGCCAGGAGGAGGTGGGTCTGGAGGTGGA
GGATCTGGTGGAGGTGGGTCTGGAGGAGGTGGGTCTCAGGTGCAGCTGCAGGAGAGCGGCCCCGGCGACGTGAAGCCC
AGCGAGACCCTGAGCCTGACCTGCACCGTGAGCGGCGGCAGCGTGAGCAGCGGCGACTACTACTGGACCTGGATCAGG
CAGAGCCCCGGCAAGGGCCTGGAGTGGATCGGCCACATCTACTACAGCGGCAACACCAACTACAACCCCAGCCTGAAG
AGCAGGCTGACCATCAGCATCGACACCAGCAAGACCACCTTCAGCCTGCAGCTGAGCAGCGTGACCGGCGAGGACACC
GCCATCTACTACTGCGTGAGGGACAGGGTGACCGGCGCCTTCGACATCTGGGGCCAGGGCACCACCGTGACCGTGAGC
AGCGCCAGCACCGGCGGCGGCGGCAGCGGCGGCGGCGGCAGCGGCGGCGGCGGCAGCGGCGGCGGCGGCAGCGACATC
CAGATGACCCAGAGCCCCAGCAGCCTGGAGGCCAGCGTGGGCGACAGGGTGACCATCACCTGCCAGGCCAGCCAGGAC
ATCAGCAACTACCTGAACTGGTACCAGCAGAAGCCCGGCAAGAGCCCCAAGCTGCTGATCTACGACGCCAGCAACCTG
GAGACCGGCGTGCCCGACAGGTTCAGCGGCAGCGGCAGCGGCACCGACTTCACCTTCACCATCAGCAGCCTGCAGGCC
GAGGACGAGGGCACCTACTTCTGCCAGCACTTCGACCACCTGCCCCTGGCCTTCGGCGGCGGCACCAAGCTGGAGATC
AAGAGGACCCATCATCACCATCACCAT
SEQID NO. 289
ATGGAGACAGACACACTCCTGCTATGGGTACTGCTGCTCTGGGTTCCAGGTTCCACTGGTGACATCGTGCTGACCCAG
AGCCCCCCCAGCCTGGCCATGAGCCTGGGCAAGAGGGCCACCATCAGCTGCAGGGCCAGCGAGAGCGTGACCATCCTG
GGCAGCCACCTGATCCACTGGTACCAGCAGAAGCCCGGCCAGCCCCCCACCCTGCTGATCCAGCTGGCCAGCAACGTG
CAGACCGGCGTGCCCGCCAGGTTCAGCGGCAGCGGCAGCAGGACCGACTTCACCCTGACCATCGACCCCGTGGAGGAG
GACGACGTGGCCGTGTACTACTGCCTGCAGAGCAGGACCATCCCCAGGACCTTCGGCGGCGGCACCAAGCTGGAGATC
AAGGGCAGCACCAGCGGCAGCGGCAAGCCCGGCAGCGGCGAGGGCAGCACCAAGGGCCAGATCCAGCTGGTGCAGAGC
GGCCCCGAGCTGAAGAAGCCCGGCGAGACCGTGAAGATCAGCTGCAAGGCCAGCGGCTACACCTTCACCGACTACAGC
ATCAACTGGGTGAAGAGGGCCCCCGGCAAGGGCCTGAAGTGGATGGGCTGGATCAACACCGAGACCAGGGAGCCCGCC
TACGCCTACGACTTCAGGGGCAGGTTCGCCTTCAGCCTGGAGACCAGCGCCAGCACCGCCTACCTGCAGATCAACAAC
CTGAAGTACGAGGACACCGCCACCTACTTCTGCGCCCTGGACTACAGCTACGCCATGGACTACTGGGGCCAGGGCACC
AGCGTGACCGTGAGCAGCGGAGGAGGTGGGTCTGGAGGTGGAGGATCTGGTGGAGGTGGGTCTCATCATCACCATCAC
CAT
SEQID NO. 290
ATGGAGTTTGGGCTGAGCTGGGTTTTCCTCGTTGCTCTTTTTAGAGGTGTCCAGTGTCAGATCCAGCTGGTGCAGAGC
GGCCCCGAGCTGAAGAAGCCCGGCGAGACCGTGAAGATCAGCTGCAAGGCCAGCGGCTACACCTTCACCGACTACAGC
ATCAACTGGGTGAAGAGGGCCCCCGGCAAGGGCCTGAAGTGGATGGGCTGGATCAACACCGAGACCAGGGAGCCCGCC
TACGCCTACGACTTCAGGGGCAGGTTCGCCTTCAGCCTGGAGACCAGCGCCAGCACCGCCTACCTGCAGATCAACAAC
CTGAAGTACGAGGACACCGCCACCTACTTCTGCGCCCTGGACTACAGCTACGCCATGGACTACTGGGGCCAGGGCACC
AGCGTGACCGTGAGCAGCGGCAGCACCAGCGGCAGCGGCAAGCCCGGCAGCGGCGAGGGCAGCACCAAGGGC
GACATCGTGCTGACCCAGAGCCCCCCCAGCCTGGCCATGAGCCTGGGCAAGAGGGCCACCATCAGCTGCAGGGCCAGC
GAGAGCGTGACCATCCTGGGCAGCCACCTGATCCACTGGTACCAGCAGAAGCCCGGCCAGCCCCCCACCCTGCTGATC
CAGCTGGCCAGCAACGTGCAGACCGGCGTGCCCGCCAGGTTCAGCGGCAGCGGCAGCAGGACCGACTTCACCCTGACC
ATCGACCCCGTGGAGGAGGACGACGTGGCCGTGTACTACTGCCTGCAGAGCAGGACCATCCCCAGGACCTTCGGCGGC
GGCACCAAGCTGGAGATCAAGGGAGGAGGTGGGTCTGGAGGTGGAGGATCTGGTGGAGGTGGGTCTCATCATCACCAT
CACCAT
SEQID NO. 291
ATGCCACCTCCTCGCCTCCTCTTCTTCCTCCTCTTCCTCACCCCCATGGAAGTCAGGCCCGAGGAACCTCTAGTGGTG
AAGGTGGAAGAGGGAGATAACGCTGTGCTGCAGTGCCTCAAGGGGACCTCAGATGGCCCCACTCAGCAGCTGACCTGG
TCTCGGGAGTCCCCGCTTAAACCCTTCTTAAAACTCAGCCTGGGGCTGCCAGGCCTGGGAATCCACATGAGGCCCCTG
GCCATCTGGCTTTTCATCTTCAACGTCTCTCAACAGATGGGGGGCTTCTACCTGTGCCAGCCGGGGCCCCCCTCTGAG
AAGGCCTGGCAGCCTGGCTGGACAGTCAATGTGGAGGGCAGCGGGGAGCTGTTCCGGTGGAATGTTTCGGACCTAGGT
GGCCTGGGCTGTGGCCTGAAGAACAGGTCCTCAGAGGGCCCCAGCTCCCCTTCCGGGAAGCTCATGAGCCCCAAGCTG
TATGTGTGGGCCAAAGACCGCCCTGAGATCTGGGAGGGAGAGCCTCCGTGTCTCCCACCGAGGGACAGCCTGAACCAG
AGCCTCAGCCAGGACCTCACCATGGCCCCTGGCTCCACACTCTGGCTGTCCTGTGGGGTACCCCCTGACTCTGTGTCC
AGGGGCCCCCTCTCCTGGACCCATGTGCACCCCAAGGGGCCTAAGTCATTGCTGAGCCTAGAGCTGAAGGACGATCGC
CCGGCCAGAGATATGTGGGTAATGGAGACGGGTCTGTTGTTGCCCCGGGCCACAGCTCAAGACGCTGGAAAGTATTAT
TGTCACCGTGGCAACCTGACCATGTCATTCCACCTGGAGATCACTGCTCGGCCAGGAGGAGGTGGGTCTGGAGGTGGA
GGATCTGGTGGAGGTGGGTCTGGAGGAGGTGGGTCTGACATCGTGCTGACCCAGAGCCCCCCCAGCCTGGCCATGAGC
CTGGGCAAGAGGGCCACCATCAGCTGCAGGGCCAGCGAGAGCGTGACCATCCTGGGCAGCCACCTGATCCACTGGTAC
CAGCAGAAGCCCGGCCAGCCCCCCACCCTGCTGATCCAGCTGGCCAGCAACGTGCAGACCGGCGTGCCCGCCAGGTTC
AGCGGCAGCGGCAGCAGGACCGACTTCACCCTGACCATCGACCCCGTGGAGGAGGACGACGTGGCCGTGTACTACTGC
CTGCAGAGCAGGACCATCCCCAGGACCTTCGGCGGCGGCACCAAGCTGGAGATCAAGGGCAGCACCAGCGGCAGCGGC
AAGCCCGGCAGCGGCGAGGGCAGCACCAAGGGCCAGATCCAGCTGGTGCAGAGCGGCCCCGAGCTGAAGAAGCCCGGC
GAGACCGTGAAGATCAGCTGCAAGGCCAGCGGCTACACCTTCACCGACTACAGCATCAACTGGGTGAAGAGGGCCCCC
GGCAAGGGCCTGAAGTGGATGGGCTGGATCAACACCGAGACCAGGGAGCCCGCCTACGCCTACGACTTCAGGGGCAGG
TTCGCCTTCAGCCTGGAGACCAGCGCCAGCACCGCCTACCTGCAGATCAACAACCTGAAGTACGAGGACACCGCCACC
TACTTCTGCGCCCTGGACTACAGCTACGCCATGGACTACTGGGGCCAGGGCACCAGCGTGACCGTGAGCAGCGGAGGA
GGTGGGTCTGGAGGTGGAGGATCTGGTGGAGGTGGGTCTCATCATCACCATCACCAT
SEQID NO. 292
ATGCCACCTCCTCGCCTCCTCTTCTTCCTCCTCTTCCTCACCCCCATGGAAGTCAGGCCCGAGGAACCTCTAGTGGTG
AAGGTGGAAGAGGGAGATAACGCTGTGCTGCAGTGCCTCAAGGGGACCTCAGATGGCCCCACTCAGCAGCTGACCTGG
TCTCGGGAGTCCCCGCTTAAACCCTTCTTAAAACTCAGCCTGGGGCTGCCAGGCCTGGGAATCCACATGAGGCCCCTG
GCCATCTGGCTTTTCATCTTCAACGTCTCTCAACAGATGGGGGGCTTCTACCTGTGCCAGCCGGGGCCCCCCTCTGAG
AAGGCCTGGCAGCCTGGCTGGACAGTCAATGTGGAGGGCAGCGGGGAGCTGTTCCGGTGGAATGTTTCGGACCTAGGT
GGCCTGGGCTGTGGCCTGAAGAACAGGTCCTCAGAGGGCCCCAGCTCCCCTTCCGGGAAGCTCATGAGCCCCAAGCTG
TATGTGTGGGCCAAAGACCGCCCTGAGATCTGGGAGGGAGAGCCTCCGTGTCTCCCACCGAGGGACAGCCTGAACCAG
AGCCTCAGCCAGGACCTCACCATGGCCCCTGGCTCCACACTCTGGCTGTCCTGTGGGGTACCCCCTGACTCTGTGTCC
AGGGGCCCCCTCTCCTGGACCCATGTGCACCCCAAGGGGCCTAAGTCATTGCTGAGCCTAGAGCTGAAGGACGATCGC
CCGGCCAGAGATATGTGGGTAATGGAGACGGGTCTGTTGTTGCCCCGGGCCACAGCTCAAGACGCTGGAAAGTATTAT
TGTCACCGTGGCAACCTGACCATGTCATTCCACCTGGAGATCACTGCTCGGCCAGGAGGAGGTGGGTCTGGAGGTGGA
GGATCTGGTGGAGGTGGGTCTGGAGGAGGTGGGTCTCAGATCCAGCTGGTGCAGAGCGGCCCCGAGCTGAAGAAGCCC
GGCGAGACCGTGAAGATCAGCTGCAAGGCCAGCGGCTACACCTTCACCGACTACAGCATCAACTGGGTGAAGAGGGCC
CCCGGCAAGGGCCTGAAGTGGATGGGCTGGATCAACACCGAGACCAGGGAGCCCGCCTACGCCTACGACTTCAGGGGC
AGGTTCGCCTTCAGCCTGGAGACCAGCGCCAGCACCGCCTACCTGCAGATCAACAACCTGAAGTACGAGGACACCGCC
ACCTACTTCTGCGCCCTGGACTACAGCTACGCCATGGACTACTGGGGCCAGGGCACCAGCGTGACCGTGAGCAGCGGC
AGCACCAGCGGCAGCGGCAAGCCCGGCAGCGGCGAGGGCAGCACCAAGGGCGACATCGTGCTGACCCAGAGCCCCCCC
AGCCTGGCCATGAGCCTGGGCAAGAGGGCCACCATCAGCTGCAGGGCCAGCGAGAGCGTGACCATCCTGGGCAGCCAC
CTGATCCACTGGTACCAGCAGAAGCCCGGCCAGCCCCCCACCCTGCTGATCCAGCTGGCCAGCAACGTGCAGACCGGC
GTGCCCGCCAGGTTCAGCGGCAGCGGCAGCAGGACCGACTTCACCCTGACCATCGACCCCGTGGAGGAGGACGACGTG
GCCGTGTACTACTGCCTGCAGAGCAGGACCATCCCCAGGACCTTCGGCGGCGGCACCAAGCTGGAGATCAAGGGAGGA
GGTGGGTCTGGAGGTGGAGGATCTGGTGGAGGTGGGTCTCATCATCACCATCACCAT
SEQID NO. 293
ATGCCACCTCCTCGCCTCCTCTTCTTCCTCCTCTTCCTCACCCCCATGGAAGTCAGGCCCGAGGAACCTCTAGTGGTG
AAGGTGGAAGAGGGAGATAACGCTGTGCTGCAGTGCCTCAAGGGGACCTCAGATGGCCCCACTCAGCAGCTGACCTGG
TCTCGGGAGTCCCCGCTTAAACCCTTCTTAAAACTCAGCCTGGGGCTGCCAGGCCTGGGAATCCACATGAGGCCCCTG
GCCATCTGGCTTTTCATCTTCAACGTCTCTCAACAGATGGGGGGCTTCTACCTGTGCCAGCCGGGGCCCCCCTCTGAG
AAGGCCTGGCAGCCTGGCTGGACAGTCAATGTGGAGGGCAGCGGGGAGCTGTTCCGGTGGAATGTTTCGGACCTAGGT
GGCCTGGGCTGTGGCCTGAAGAACAGGTCCTCAGAGGGCCCCAGCTCCCCTTCCGGGAAGCTCATGAGCCCCAAGCTG
TATGTGTGGGCCAAAGACCGCCCTGAGATCTGGGAGGGAGAGCCTCCGTGTCTCCCACCGAGGGACAGCCTGAACCAG
AGCCTCAGCCAGGACCTCACCATGGCCCCTGGCTCCACACTCTGGCTGTCCTGTGGGGTACCCCCTGACTCTGTGTCC
AGGGGCCCCCTCTCCTGGACCCATGTGCACCCCAAGGGGCCTAAGTCATTGCTGAGCCTAGAGCTGAAGGACGATCGC
CCGGCCAGAGATATGTGGGTAATGGAGACGGGTCTGTTGTTGCCCCGGGCCACAGCTCAAGACGCTGGAAAGTATTAT
TGTCACCGTGGCAACCTGACCATGTCATTCCACCTGGAGATCACTGCTCGGCCAGACAAAACTCACACATGCCCACCG
TGCCCAGCACCTGAACTCCTGGGGGGACCGTCAGTCTTCCTCTTCCCCCCAAAACCCAAGGACACCCTCATGATCTCC
CGGACCCCTGAGGTCACATGCGTGGTGGTGGACGTGAGCCACGAAGACCCTGAGGTCAAGTTCAACTGGTACGTGGAC
GGCGTGGAGGTGCATAATGCCAAGACAAAGCCGCGGGAGGAGCAGTACAACAGCACGTACCGTGTGGTCAGCGTCCTC
ACCGTCCTGCACCAGGACTGGCTGAATGGCAAGGAGTACAAGTGCAAGGTCTCCAACAAAGCCCTCCCAGCCCCCATC
GAGAAAACCATCTCCAAAGCCAAAGGGCAGCCCCGAGAACCACAGGTGTACACCCTGCCCCCATCCCGGGAGGAGATG
ACCAAGAACCAGGTCAGCCTGACCTGCCTGGTCAAAGGCTTCTATCCCAGCGACATCGCCGTGGAGTGGGAGAGCAAT
GGGCAGCCGGAGAACAACTACAAGACCACGCCTCCCGTGCTGGACTCCGACGGCTCCTTCTTCCTCTACAGCAAGCTC
ACCGTGGACAAGAGCAGGTGGCAGCAGGGGAACGTCTTCTCATGCTCCGTGATGCACGAGGCTCTGCACAACCACTAC
ACGCAGAAGAGCCTCTCCCTGTCTCCGGGTGGAGGAGGTGGGTCTGGAGGTGGAGGATCTGGTGGAGGTGGGTCTGGA
GGAGGTGGGTCTGAGGTGCAGCTGGTGGAGTCTGGTGGTGGTCTTGTTCAACCTGGTGGTTCTCTTCGTCTTTCTTGT
GCTGCTTCTGGTTTTAATATTAAAGATACTTATATTCATTGGGTTCGTCAAGCTCCTGGTAAAGGTCTTGAATGGGTT
GCTCGTATTTATCCTACTAATGGTTATACTCGTTATGCTGATTCTGTTAAAGGTCGTTTTACTATTTCTGCTGATACT
TCTAAAAATACTGCTTATCTTCAAATGAACTCTCTTCGTGCTGAAGATACTGCTGTTTATTATTGTTCTCGTTGGGGT
GGTGATGGTTTTTATGCTATGGATTATTGGGGTCAAGGTACTCTTGTCACCGTCTCCTCAGCTAGCACCGGGGGAGGT
GGGTCTGGAGGTGGAGGATCTGGTGGAGGTGGGTCTGACATCCAGATGACCCAGTCTCCTTCTTCTCTTTCTGCTTCT
GTTGGTGATCGTGTTACTATTACTTGTCGTGCTTCTCAAGATGTTAATACTGCTGTTGCTTGGTATCAACAAAAACCT
GGTAAAGCTCCTAAACTTCTTATTTATTCTGCTTCTTTTCTTTATTCTGGTGTTCCTTCTCGTTTTTCTGGTTCTCGT
TCTGGTACTGATTTTACTCTTACTATTTCTTCTCTTCAACCTGAAGATTTTGCTACTTATTATTGTCAACAACATTAT
ACTACTCCTCCTACTTTTGGTCAAGGTACCAAGGTGGAGATCAAACGTACG
SEQID NO. 294
ATGCCACCTCCTCGCCTCCTCTTCTTCCTCCTCTTCCTCACCCCCATGGAAGTCAGGCCCGAGGAACCTCTAGTGGTG
AAGGTGGAAGAGGGAGATAACGCTGTGCTGCAGTGCCTCAAGGGGACCTCAGATGGCCCCACTCAGCAGCTGACCTGG
TCTCGGGAGTCCCCGCTTAAACCCTTCTTAAAACTCAGCCTGGGGCTGCCAGGCCTGGGAATCCACATGAGGCCCCTG
GCCATCTGGCTTTTCATCTTCAACGTCTCTCAACAGATGGGGGGCTTCTACCTGTGCCAGCCGGGGCCCCCCTCTGAG
AAGGCCTGGCAGCCTGGCTGGACAGTCAATGTGGAGGGCAGCGGGGAGCTGTTCCGGTGGAATGTTTCGGACCTAGGT
GGCCTGGGCTGTGGCCTGAAGAACAGGTCCTCAGAGGGCCCCAGCTCCCCTTCCGGGAAGCTCATGAGCCCCAAGCTG
TATGTGTGGGCCAAAGACCGCCCTGAGATCTGGGAGGGAGAGCCTCCGTGTCTCCCACCGAGGGACAGCCTGAACCAG
AGCCTCAGCCAGGACCTCACCATGGCCCCTGGCTCCACACTCTGGCTGTCCTGTGGGGTACCCCCTGACTCTGTGTCC
AGGGGCCCCCTCTCCTGGACCCATGTGCACCCCAAGGGGCCTAAGTCATTGCTGAGCCTAGAGCTGAAGGACGATCGC
CCGGCCAGAGATATGTGGGTAATGGAGACGGGTCTGTTGTTGCCCCGGGCCACAGCTCAAGACGCTGGAAAGTATTAT
TGTCACCGTGGCAACCTGACCATGTCATTCCACCTGGAGATCACTGCTCGGCCAGGGGGAGGTGGGTCTGGAGGTGGA
GGATCTGGTGGAGGTGGGTCTGGTGGAGGTGGGTCTGAGGTGCAGCTGGTGGAGTCTGGTGGTGGTCTTGTTCAACCT
GGTGGTTCTCTTCGTCTTTCTTGTGCTGCTTCTGGTTTTAATATTAAAGATACTTATATTCATTGGGTTCGTCAAGCT
CCTGGTAAAGGTCTTGAATGGGTTGCTCGTATTTATCCTACTAATGGTTATACTCGTTATGCTGATTCTGTTAAAGGT
CGTTTTACTATTTCTGCTGATACTTCTAAAAATACTGCTTATCTTCAAATGAACTCTCTTCGTGCTGAAGATACTGCT
GTTTATTATTGTTCTCGTTGGGGTGGTGATGGTTTTTATGCTATGGATTATTGGGGTCAAGGTACTCTTGTCACCGTC
TCCTCAGCTAGCACCGGGGGAGGTGGGTCTGGAGGTGGAGGATCTGGTGGAGGTGGGTCTGACATCCAGATGACCCAG
TCTCCTTCTTCTCTTTCTGCTTCTGTTGGTGATCGTGTTACTATTACTTGTCGTGCTTCTCAAGATGTTAATACTGCT
GTTGCTTGGTATCAACAAAAACCTGGTAAAGCTCCTAAACTTCTTATTTATTCTGCTTCTTTTCTTTATTCTGGTGTT
CCTTCTCGTTTTTCTGGTTCTCGTTCTGGTACTGATTTTACTCTTACTATTTCTTCTCTTCAACCTGAAGATTTTGCT
ACTTATTATTGTCAACAACATTATACTACTCCTCCTACTTTTGGTCAAGGTACCAAGGTGGAGATCAAACGTACGGGA
GGAGGTGGGTCTGGAGGTGGAGGATCTGGTGGAGGTGGGTCTGGAGGAGGTGGGTCTCAGGTGCAGCTGCAGGAGAGC
GGCCCCGGCGACGTGAAGCCCAGCGAGACCCTGAGCCTGACCTGCACCGTGAGCGGCGGCAGCGTGAGCAGCGGCGAC
TACTACTGGACCTGGATCAGGCAGAGCCCCGGCAAGGGCCTGGAGTGGATCGGCCACATCTACTACAGCGGCAACACC
AACTACAACCCCAGCCTGAAGAGCAGGCTGACCATCAGCATCGACACCAGCAAGACCACCTTCAGCCTGCAGCTGAGC
AGCGTGACCGGCGAGGACACCGCCATCTACTACTGCGTGAGGGACAGGGTGACCGGCGCCTTCGACATCTGGGGCCAG
GGCACCACCGTGACCGTGAGCAGCGCCAGCACCGGCGGAGGTGGCAGCGGCGGAGGTGGCAGCGGCGGAGGTGGCAGC
GGCGGAGGTGGCAGCGACATCCAGATGACCCAGAGCCCCAGCAGCCTGGAGGCCAGCGTGGGCGACAGGGTGACCATC
ACCTGCCAGGCCAGCCAGGACATCAGCAACTACCTGAACTGGTACCAGCAGAAGCCCGGCAAGAGCCCCAAGCTGCTG
ATCTACGACGCCAGCAACCTGGAGACCGGCGTGCCCGACAGGTTCAGCGGCAGCGGCAGCGGCACCGACTTCACCTTC
ACCATCAGCAGCCTGCAGGCCGAGGACGAGGGCACCTACTTCTGCCAGCACTTCGACCACCTGCCCCTGGCCTTCGGC
GGCGGCACCAAGCTGGAGATCAAGAGGACCGGAGGAGGTGGGTCTCATCATCACCATCACCAT
SEQID NO. 295
ATGCCACCTCCTCGCCTCCTCTTCTTCCTCCTCTTCCTCACCCCCATGGAAGTCAGGCCCGAGGAACCTCTAGTGGTG
AAGGTGGAAGAGGGAGATAACGCTGTGCTGCAGTGCCTCAAGGGGACCTCAGATGGCCCCACTCAGCAGCTGACCTGG
TCTCGGGAGTCCCCGCTTAAACCCTTCTTAAAACTCAGCCTGGGGCTGCCAGGCCTGGGAATCCACATGAGGCCCCTG
GCCATCTGGCTTTTCATCTTCAACGTCTCTCAACAGATGGGGGGCTTCTACCTGTGCCAGCCGGGGCCCCCCTCTGAG
AAGGCCTGGCAGCCTGGCTGGACAGTCAATGTGGAGGGCAGCGGGGAGCTGTTCCGGTGGAATGTTTCGGACCTAGGT
GGCCTGGGCTGTGGCCTGAAGAACAGGTCCTCAGAGGGCCCCAGCTCCCCTTCCGGGAAGCTCATGAGCCCCAAGCTG
TATGTGTGGGCCAAAGACCGCCCTGAGATCTGGGAGGGAGAGCCTCCGTGTCTCCCACCGAGGGACAGCCTGAACCAG
AGCCTCAGCCAGGACCTCACCATGGCCCCTGGCTCCACACTCTGGCTGTCCTGTGGGGTACCCCCTGACTCTGTGTCC
AGGGGCCCCCTCTCCTGGACCCATGTGCACCCCAAGGGGCCTAAGTCATTGCTGAGCCTAGAGCTGAAGGACGATCGC
CCGGCCAGAGATATGTGGGTAATGGAGACGGGTCTGTTGTTGCCCCGGGCCACAGCTCAAGACGCTGGAAAGTATTAT
TGTCACCGTGGCAACCTGACCATGTCATTCCACCTGGAGATCACTGCTCGGCCAGGGGGAGGTGGGTCTGGAGGTGGA
GGATCTGGTGGAGGTGGGTCTGGTGGAGGTGGGTCTGAGGTGCAGCTGGTGGAGTCTGGTGGTGGTCTTGTTCAACCT
GGTGGTTCTCTTCGTCTTTCTTGTGCTGCTTCTGGTTTTAATATTAAAGATACTTATATTCATTGGGTTCGTCAAGCT
CCTGGTAAAGGTCTTGAATGGGTTGCTCGTATTTATCCTACTAATGGTTATACTCGTTATGCTGATTCTGTTAAAGGT
CGTTTTACTATTTCTGCTGATACTTCTAAAAATACTGCTTATCTTCAAATGAACTCTCTTCGTGCTGAAGATACTGCT
GTTTATTATTGTTCTCGTTGGGGTGGTGATGGTTTTTATGCTATGGATTATTGGGGTCAAGGTACTCTTGTCACCGTC
TCCTCAGCTAGCACCGGGGGAGGTGGGTCTGGAGGTGGAGGATCTGGTGGAGGTGGGTCTGACATCCAGATGACCCAG
TCTCCTTCTTCTCTTTCTGCTTCTGTTGGTGATCGTGTTACTATTACTTGTCGTGCTTCTCAAGATGTTAATACTGCT
GTTGCTTGGTATCAACAAAAACCTGGTAAAGCTCCTAAACTTCTTATTTATTCTGCTTCTTTTCTTTATTCTGGTGTT
CCTTCTCGTTTTTCTGGTTCTCGTTCTGGTACTGATTTTACTCTTACTATTTCTTCTCTTCAACCTGAAGATTTTGCT
ACTTATTATTGTCAACAACATTATACTACTCCTCCTACTTTTGGTCAAGGTACCAAGGTGGAGATCAAACGTACGGGA
GGAGGTGGGTCTGGAGGTGGAGGATCTGGTGGAGGTGGGTCTGGAGGAGGTGGGTCTGACATCCAGATGACCCAGAGC
CCCAGCAGCCTGGAGGCCAGCGTGGGCGACAGGGTGACCATCACCTGCCAGGCCAGCCAGGACATCAGCAACTACCTG
AACTGGTACCAGCAGAAGCCCGGCAAGAGCCCCAAGCTGCTGATCTACGACGCCAGCAACCTGGAGACCGGCGTGCCC
GACAGGTTCAGCGGCAGCGGCAGCGGCACCGACTTCACCTTCACCATCAGCAGCCTGCAGGCCGAGGACGAGGGCACC
TACTTCTGCCAGCACTTCGACCACCTGCCCCTGGCCTTCGGCGGCGGCACCAAGCTGGAGATCAAGAGGACCGGCGGA
GGTGGCAGCGGCGGAGGTGGCAGCGGCGGAGGTGGCAGCGGCGGAGGTGGCAGCCAGGTGCAGCTGCAGGAGAGCGGC
CCCGGCGACGTGAAGCCCAGCGAGACCCTGAGCCTGACCTGCACCGTGAGCGGCGGCAGCGTGAGCAGCGGCGACTAC
TACTGGACCTGGATCAGGCAGAGCCCCGGCAAGGGCCTGGAGTGGATCGGCCACATCTACTACAGCGGCAACACCAAC
TACAACCCCAGCCTGAAGAGCAGGCTGACCATCAGCATCGACACCAGCAAGACCACCTTCAGCCTGCAGCTGAGCAGC
GTGACCGGCGAGGACACCGCCATCTACTACTGCGTGAGGGACAGGGTGACCGGCGCCTTCGACATCTGGGGCCAGGGC
ACCACCGTGACCGTGAGCAGCGCCAGCACCGGAGGAGGTGGGTCTCATCATCACCATCACCAT
SEQID NO. 296
ATGGAGTTTGGGCTGAGCTGGGTTTTCCTCGTTGCTCTTTTTAGAGGTGTCCAGTGTGAGGTGCAGCTGGTGGAGTCT
GGTGGTGGTCTTGTTCAACCTGGTGGTTCTCTTCGTCTTTCTTGTGCTGCTTCTGGTTTTAATATTAAAGATACTTAT
ATTCATTGGGTTCGTCAAGCTCCTGGTAAAGGTCTTGAATGGGTTGCTCGTATTTATCCTACTAATGGTTATACTCGT
TATGCTGATTCTGTTAAAGGTCGTTTTACTATTTCTGCTGATACTTCTAAAAATACTGCTTATCTTCAAATGAACTCT
CTTCGTGCTGAAGATACTGCTGTTTATTATTGTTCTCGTTGGGGTGGTGATGGTTTTTATGCTATGGATTATTGGGGT
CAAGGTACTCTTGTCACCGTCTCCTCAGCTAGCACCGGGGGAGGTGGGTCTGGAGGTGGAGGATCTGGTGGAGGTGGG
TCTGACATCCAGATGACCCAGTCTCCTTCTTCTCTTTCTGCTTCTGTTGGTGATCGTGTTACTATTACTTGTCGTGCT
TCTCAAGATGTTAATACTGCTGTTGCTTGGTATCAACAAAAACCTGGTAAAGCTCCTAAACTTCTTATTTATTCTGCT
TCTTTTCTTTATTCTGGTGTTCCTTCTCGTTTTTCTGGTTCTCGTTCTGGTACTGATTTTACTCTTACTATTTCTTCT
CTTCAACCTGAAGATTTTGCTACTTATTATTGTCAACAACATTATACTACTCCTCCTACTTTTGGTCAAGGTACCAAG
GTGGAGATCAAACGTACGGGAGGAGGTGGGTCTGGAGGTGGAGGATCTGGTGGAGGTGGGTCTGGAGGAGGTGGGTCT
CAGGTGCAGCTGCAGGAGAGCGGCCCCGGCGACGTGAAGCCCAGCGAGACCCTGAGCCTGACCTGCACCGTGAGCGGC
GGCAGCGTGAGCAGCGGCGACTACTACTGGACCTGGATCAGGCAGAGCCCCGGCAAGGGCCTGGAGTGGATCGGCCAC
ATCTACTACAGCGGCAACACCAACTACAACCCCAGCCTGAAGAGCAGGCTGACCATCAGCATCGACACCAGCAAGACC
ACCTTCAGCCTGCAGCTGAGCAGCGTGACCGGCGAGGACACCGCCATCTACTACTGCGTGAGGGACAGGGTGACCGGC
GCCTTCGACATCTGGGGCCAGGGCACCACCGTGACCGTGAGCAGCGCCAGCACCGGCGGAGGTGGCAGCGGCGGAGGT
GGCAGCGGCGGAGGTGGCAGCGGCGGAGGTGGCAGCGACATCCAGATGACCCAGAGCCCCAGCAGCCTGGAGGCCAGC
GTGGGCGACAGGGTGACCATCACCTGCCAGGCCAGCCAGGACATCAGCAACTACCTGAACTGGTACCAGCAGAAGCCC
GGCAAGAGCCCCAAGCTGCTGATCTACGACGCCAGCAACCTGGAGACCGGCGTGCCCGACAGGTTCAGCGGCAGCGGC
AGCGGCACCGACTTCACCTTCACCATCAGCAGCCTGCAGGCCGAGGACGAGGGCACCTACTTCTGCCAGCACTTCGAC
CACCTGCCCCTGGCCTTCGGCGGCGGCACCAAGCTGGAGATCAAGAGGACCGGAGGAGGTGGGTCTCATCATCACCAT
CACCAT
SEQID NO. 297
ATGGAGTTTGGGCTGAGCTGGGTTTTCCTCGTTGCTCTTTTTAGAGGTGTCCAGTGTGAGGTGCAGCTGGTGGAGTCT
GGTGGTGGTCTTGTTCAACCTGGTGGTTCTCTTCGTCTTTCTTGTGCTGCTTCTGGTTTTAATATTAAAGATACTTAT
ATTCATTGGGTTCGTCAAGCTCCTGGTAAAGGTCTTGAATGGGTTGCTCGTATTTATCCTACTAATGGTTATACTCGT
TATGCTGATTCTGTTAAAGGTCGTTTTACTATTTCTGCTGATACTTCTAAAAATACTGCTTATCTTCAAATGAACTCT
CTTCGTGCTGAAGATACTGCTGTTTATTATTGTTCTCGTTGGGGTGGTGATGGTTTTTATGCTATGGATTATTGGGGT
CAAGGTACTCTTGTCACCGTCTCCTCAGCTAGCACCGGGGGAGGTGGGTCTGGAGGTGGAGGATCTGGTGGAGGTGGG
TCTGACATCCAGATGACCCAGTCTCCTTCTTCTCTTTCTGCTTCTGTTGGTGATCGTGTTACTATTACTTGTCGTGCT
TCTCAAGATGTTAATACTGCTGTTGCTTGGTATCAACAAAAACCTGGTAAAGCTCCTAAACTTCTTATTTATTCTGCT
TCTTTTCTTTATTCTGGTGTTCCTTCTCGTTTTTCTGGTTCTCGTTCTGGTACTGATTTTACTCTTACTATTTCTTCT
CTTCAACCTGAAGATTTTGCTACTTATTATTGTCAACAACATTATACTACTCCTCCTACTTTTGGTCAAGGTACCAAG
GTGGAGATCAAACGTACGGGAGGAGGTGGGTCTGGAGGTGGAGGATCTGGTGGAGGTGGGTCTGGAGGAGGTGGGTCT
GACATCCAGATGACCCAGAGCCCCAGCAGCCTGGAGGCCAGCGTGGGCGACAGGGTGACCATCACCTGCCAGGCCAGC
CAGGACATCAGCAACTACCTGAACTGGTACCAGCAGAAGCCCGGCAAGAGCCCCAAGCTGCTGATCTACGACGCCAGC
AACCTGGAGACCGGCGTGCCCGACAGGTTCAGCGGCAGCGGCAGCGGCACCGACTTCACCTTCACCATCAGCAGCCTG
CAGGCCGAGGACGAGGGCACCTACTTCTGCCAGCACTTCGACCACCTGCCCCTGGCCTTCGGCGGCGGCACCAAGCTG
GAGATCAAGAGGACCGGCGGAGGTGGCAGCGGCGGAGGTGGCAGCGGCGGAGGTGGCAGCGGCGGAGGTGGCAGCCAG
GTGCAGCTGCAGGAGAGCGGCCCCGGCGACGTGAAGCCCAGCGAGACCCTGAGCCTGACCTGCACCGTGAGCGGCGGC
AGCGTGAGCAGCGGCGACTACTACTGGACCTGGATCAGGCAGAGCCCCGGCAAGGGCCTGGAGTGGATCGGCCACATC
TACTACAGCGGCAACACCAACTACAACCCCAGCCTGAAGAGCAGGCTGACCATCAGCATCGACACCAGCAAGACCACC
TTCAGCCTGCAGCTGAGCAGCGTGACCGGCGAGGACACCGCCATCTACTACTGCGTGAGGGACAGGGTGACCGGCGCC
TTCGACATCTGGGGCCAGGGCACCACCGTGACCGTGAGCAGCGCCAGCACCGGAGGAGGTGGGTCTCATCATCACCAT
CACCAT
SEQID NO. 298
GATATCGAATTAGGAGGAAAACTGTTTCATACAGAAGGCGTCAATTAGGAGGAAAAACTGTTTCATACAGAAGGCGTC
AATTAGGAGGAAAAACTGTTTCATACAGAAGGCGTCAATTGGTCCCATCGAATTAGGAGGAAAAACTGTTTCATACAG
AAGGCGTCAATTAGGAGGAAAAACTGTTTCATACAGAAGGCGTCAATTAGGAGGAAAAACTGTTTCATACAGAAGGCG
TCAATTGGTCCCGGGACATTTTGACACCCCCATAATATTTTTCCAGAATTAACAGTATAAATTGCATCTCTTGTTCAA
GAGTTCCCTATCACTCTCTTTAATCACTACTCACAGTAACCTCAACTCCTGGCGGCCGCGCCACCATGCCACCTCCTC
GCCTCCTCTTCTTCCTCCTCTTCCTCACCCCCATGGAAGTCAGGCCCGAGGAACCTCTAGTGGTGAAGGTGGAAGAGG
GAGATAACGCTGTGCTGCAGTGCCTCAAGGGGACCTCAGATGGCCCCACTCAGCAGCTGACTTGGTCTCGGGAGTCCC
CGCTTAAACCCTTCTTAAAACTCAGCCTGGGGCTGCCAGGCCTGGGAATCCACATGAGGCCCCTGGCCATCTGGCTTT
TCATCTTCAACGTCTCTCAACAGATGGGGGGCTTCTACCTGTGCCAGCCGGGGCCCCCCTCTGAGAAGGCCTGGCAGC
CTGGCTGGACAGTCAATGTGGAGGGCAGCGGGGAGCTGTTCCGGTGGAATGTTTCGGACCTAGGTGGCCTGGGCTGTG
GCCTGAAGAACAGGTCCTCAGAGGGCCCCAGCTCCCCTTCCGGGAAGCTCATGAGCCCCAAGCTGTATGTGTGGGCCA
AAGACCGCCCTGAGATCTGGGAGGGAGAGCCTCCGTGTCTCCCACCGAGGGACAGCCTGAACCAGAGCCTCAGCCAGG
ACCTCACCATGGCCCCTGGCTCCACACTCTGGCTGTCCTGTGGGGTACCCCCTGACTCTGTGTCCAGGGGCCCCCTCT
CCTGGACCCATGTGCACCCCAAGGGGCCTAAGTCATTGCTGAGCCTAGAGCTGAAGGACGATCGCCCGGCCAGAGATA
TGTGGGTAATGGAGACGGGTCTGTTGTTGCCCCGGGCCACAGCTCAAGACGCTGGAAAGTATTATTGTCACCGTGGCA
ACCTGACCATGTCATTCCACCTGGAGATCACTGCTCGGCCAGGGGGAGGTGGGTCTGGAGGTGGAGGATCTGGTGGAG
GTGGGTCTGGTGGAGGTGGGTCTGAGGTGCAGCTGGTGGAGTCTGGTGGTGGTCTTGTTCAACCCGGTGGTTCTCTTC
GTCTTTCTTGTGCTGCTTCTGGTTTTAATATTAAAGATACTTATATTCATTGGGTTCGTCAAGCTCCTGGTAAAGGTC
TTGAATGGGTTGCTCGTATTTATCCTACTAATGGTTATACTCGTTATGCTGATTCTGTTAAAGGTCGTTTTACTATTT
CTGCTGATACTTCTAAAAATACTGCTTATCTTCAAATGAACTCTCTTCGTGCTGAAGATACTGCTGTTTATTATTGTT
CTCGTTGGGGTGGTGATGGTTTTTATGCTATGGATTATTGGGGTCAAGGTACTCTTGTCACCGTCTCCTCAGCTAGCA
CCGGGGGAGGTGGGTCTGGAGGTGGAGGATCTGGTGGAGGTGGGTCTGACATCCAGATGACCCAGTCTCCTTCTTCTC
TTTCTGCTTCTGTTGGTGATCGTGTTACTATTACTTGTCGTGCTTCTCAAGATGTTAATACTGCTGTTGCTTGGTATC
AACAAAAACCCGGTAAAGCTCCTAAACTTCTTATTTATTCTGCTTCTTTTCTTTATTCTGGTGTTCCTTCTCGTTTTT
CTGGTTCTCGTTCTGGTACTGATTTTACTCTTACTATTTCTTCTCTTCAACCTGAAGATTTTGCTACTTATTATTGTC
AACAACATTATACTACTCCTCCTACTTTTGGTCAAGGTACCAAGGTGGAGATCAAACGTACGCATCATCACCATCACC
AT
SEQID NO. 299
ATGGATTTTCAGGTGCAGATTTTCAGCTTCCTGCTAATCAGTGCCTCAGTCATAATGTCTAGAATGGCCCAGGTCAAA
CTACAGGAGTCAGGGGCTGAGCTGGTGAAGCCTGGGGCCTCAGTGAAGATGTCCTGCAAGGCTTCTGGCTACACATTT
ACCAGTTACAATATGCACTGGGTAAAGCAGACACCTGGACAGGGCCTGGAATGGATTGGAGCTATTTATCCAGGAAAT
GGTGATACTTCCTACAATCAGAAGTTCAAAGGCAAGGCCACATTGACTGCAGACAAATCCTCCAGCACAGCCTACATG
CAGCTCAGCAGCCTGACATCTGAGGACTCTGCGGACTATTACTGTGCAAGATCTAATTATTACGGTAGTAGCTACTGG
TTCTTCGATGTCTGGGGCCAAGGGACCACGGTCACCGTCTCCTCAGGTGGAGGCGGTTCAGGCGGAGGTGGCTCTGGC
GGTGGCGGATCGGACATCGAGCTCACTCAGTCTCCAACAATCCTGTCTGCATCTCCAGGGGAGAAGGTCACAATGACT
TGCAGGGCCAGCTCAAGTGTAAATTACATGGACTGGTACCAGAAGAAGCCAGGATCCTCCCCCAAACCCTGGATTTAT
GCCACATCCAACCTGGCTTCTGGAGTCCCTGCTCGCTTCAGTGGCAGTGGGTCTGGGACCTCTTACTCTCTCACAATC
AGCAGAGTGGAGGCTGAAGATGCTGCCACTTATTACTGCCAGCAGTGGAGTTTTAATCCACCCACGTTCGGAGGGGGG
ACAAAGTTGGAAATAAAACGGGCCGCCGCTGGTGATCCCGCCGAGCCCAAATCTCCTGACAAAACTCACACATGCCCA
CCGTGCCCAGCACCTGAACTCCTGGGGGGACCGTCAGTCTTCCTCTTCCCCCCAAAACCCAAGGACACCCTCATGATC
TCCCGGACCCCTGAGGTCACATGCGTGGTGGTGGACGTGAGCCACGAAGACCCTGAGGTCAAGTTCAACTGGTACGTG
GACGGCGTGGAGGTGCATAATGCCAAGACAAAGCCGCGGGAGGAGCAGTACAACAGCACGTACCGTGTGGTCAGCGTC
CTCACCGTCCTGCACCAGGACTGGCTGAATGGCAAGGAGTACAAGTGCAAGGTCTCCAACAAAGCCCTCCCAGCCCCC
ATCGAGAAAACCATCTCCAAAGCCAAAGGGCAGCCCCGAGAACCACAGGTGTACACCCTGCCCCCATCCCGGGAGGAG
ATGACCAAGAACCAGGTCAGCCTGACCTGCCTGGTCAAAGGCTTCTATCCCAGCGACATCGCCGTGGAGTGGGAGAGC
AATGGGCAGCCGGAGAACAACTACAAGACCACGCCTCCCGTGCTGGACTCCGACGGCTCCTTCTTCCTCTACAGCAAG
CTCACCGTGGACAAGAGCAGGTGGCAGCAGGGGAACGTCTTCTCATGCTCCGTGATGCACGAGGCTCTGCACAACCAC
TACACGCAGAAGAGCCTCTCCCTGTCTCCGGGT
SEQID NO. 300
ATGGATTTTCAGGTGCAGATTTTCAGCTTCCTGCTAATCAGTGCCTCAGTCATAATGTCTAGAATGGCCCAGGTCAAA
CTACAGGAGTCAGGGGCTGAGCTGGTGAAGCCTGGGGCCTCAGTGAAGATGTCCTGCAAGGCTTCTGGCTACACATTT
ACCAGTTACAATATGCACTGGGTAAAGCAGACACCTGGACAGGGCCTGGAATGGATTGGAGCTATTTATCCAGGAAAT
GGTGATACTTCCTACAATCAGAAGTTCAAAGGCAAGGCCACATTGACTGCAGACAAATCCTCCAGCACAGCCTACATG
CAGCTCAGCAGCCTGACATCTGAGGACTCTGCGGACTATTACTGTGCAAGATCTAATTATTACGGTAGTAGCTACTGG
TTCTTCGATGTCTGGGGCCAAGGGACCACGGTCACCGTCTCCTCAGGTGGAGGCGGTTCAGGCGGAGGTGGCTCTGGC
GGTGGCGGATCGGACATCGAGCTCACTCAGTCTCCAACAATCCTGTCTGCATCTCCAGGGGAGAAGGTCACAATGACT
TGCAGGGCCAGCTCAAGTGTAAATTACATGGACTGGTACCAGAAGAAGCCAGGATCCTCCCCCAAACCCTGGATTTAT
GCCACATCCAACCTGGCTTCTGGAGTCCCTGCTCGCTTCAGTGGCAGTGGGTCTGGGACCTCTTACTCTCTCACAATC
AGCAGAGTGGAGGCTGAAGATGCTGCCACTTATTACTGCCAGCAGTGGAGTTTTAATCCACCCACGTTCGGAGGGGGG
ACAAAGTTGGAAATAAAACGGGCCGCCGCTCATCATCACCATCACCAT
SEQID NO. 301
ATGGATTTTCAGGTGCAGATTTTCAGCTTCCTGCTAATCAGTGCCTCAGTCATAATGTCTAGAGACATCGAGCTCACT
CAGTCTCCAACAATCCTGTCTGCATCTCCAGGGGAGAAGGTCACAATGACTTGCAGGGCCAGCTCAAGTGTAAATTAC
ATGGACTGGTACCAGAAGAAGCCAGGATCCTCCCCCAAACCCTGGATTTATGCCACATCCAACCTGGCTTCTGGAGTC
CCTGCTCGCTTCAGTGGCAGTGGGTCTGGGACCTCTTACTCTCTCACAATCAGCAGAGTGGAGGCTGAAGATGCTGCC
ACTTATTACTGCCAGCAGTGGAGTTTTAATCCACCCACGTTCGGAGGGGGGACAAAGTTGGAAATAAAACGGGGTGGA
GGCGGTTCAGGCGGAGGTGGCTCTGGCGGTGGCGGATCGATGGCCCAGGTCAAACTACAGGAGTCAGGGGCTGAGCTG
GTGAAGCCTGGGGCCTCAGTGAAGATGTCCTGCAAGGCTTCTGGCTACACATTTACCAGTTACAATATGCACTGGGTA
AAGCAGACACCTGGACAGGGCCTGGAATGGATTGGAGCTATTTATCCAGGAAATGGTGATACTTCCTACAATCAGAAG
TTCAAAGGCAAGGCCACATTGACTGCAGACAAATCCTCCAGCACAGCCTACATGCAGCTCAGCAGCCTGACATCTGAG
GACTCTGCGGACTATTACTGTGCAAGATCTAATTATTACGGTAGTAGCTACTGGTTCTTCGATGTCTGGGGCCAAGGG
ACCACGGTCACCGTCTCCTCAGCCGCCGCTGGTGATCCCGCCGAGCCCAAATCTCCTGACAAAACTCACACATGCCCA
CCGTGCCCAGCACCTGAACTCCTGGGGGGACCGTCAGTCTTCCTCTTCCCCCCAAAACCCAAGGACACCCTCATGATC
TCCCGGACCCCTGAGGTCACATGCGTGGTGGTGGACGTGAGCCACGAAGACCCTGAGGTCAAGTTCAACTGGTACGTG
GACGGCGTGGAGGTGCATAATGCCAAGACAAAGCCGCGGGAGGAGCAGTACAACAGCACGTACCGTGTGGTCAGCGTC
CTCACCGTCCTGCACCAGGACTGGCTGAATGGCAAGGAGTACAAGTGCAAGGTCTCCAACAAAGCCCTCCCAGCCCCC
ATCGAGAAAACCATCTCCAAAGCCAAAGGGCAGCCCCGAGAACCACAGGTGTACACCCTGCCCCCATCCCGGGAGGAG
ATGACCAAGAACCAGGTCAGCCTGACCTGCCTGGTCAAAGGCTTCTATCCCAGCGACATCGCCGTGGAGTGGGAGAGC
AATGGGCAGCCGGAGAACAACTACAAGACCACGCCTCCCGTGCTGGACTCCGACGGCTCCTTCTTCCTCTACAGCAAG
CTCACCGTGGACAAGAGCAGGTGGCAGCAGGGGAACGTCTTCTCATGCTCCGTGATGCACGAGGCTCTGCACAACCAC
TACACGCAGAAGAGCCTCTCCCTGTCTCCGGGT
SEQID NO. 302
ATGGATTTTCAGGTGCAGATTTTCAGCTTCCTGCTAATCAGTGCCTCAGTCATAATGTCTAGAGACATCGAGCTCACT
CAGTCTCCAACAATCCTGTCTGCATCTCCAGGGGAGAAGGTCACAATGACTTGCAGGGCCAGCTCAAGTGTAAATTAC
ATGGACTGGTACCAGAAGAAGCCAGGATCCTCCCCCAAACCCTGGATTTATGCCACATCCAACCTGGCTTCTGGAGTC
CCTGCTCGCTTCAGTGGCAGTGGGTCTGGGACCTCTTACTCTCTCACAATCAGCAGAGTGGAGGCTGAAGATGCTGCC
ACTTATTACTGCCAGCAGTGGAGTTTTAATCCACCCACGTTCGGAGGGGGGACAAAGTTGGAAATAAAACGGGGTGGA
GGCGGTTCAGGCGGAGGTGGCTCTGGCGGTGGCGGATCGATGGCCCAGGTCAAACTACAGGAGTCAGGGGCTGAGCTG
GTGAAGCCTGGGGCCTCAGTGAAGATGTCCTGCAAGGCTTCTGGCTACACATTTACCAGTTACAATATGCACTGGGTA
AAGCAGACACCTGGACAGGGCCTGGAATGGATTGGAGCTATTTATCCAGGAAATGGTGATACTTCCTACAATCAGAAG
TTCAAAGGCAAGGCCACATTGACTGCAGACAAATCCTCCAGCACAGCCTACATGCAGCTCAGCAGCCTGACATCTGAG
GACTCTGCGGACTATTACTGTGCAAGATCTAATTATTACGGTAGTAGCTACTGGTTCTTCGATGTCTGGGGCCAAGGG
ACCACGGTCACCGTCTCCTCAGCCGCCGCTCATCATCACCATCACCAT
SEQID NO. 303
ATGGAGTTTGGGCTGAGCTGGGTTTTCCTCGTTGCTCTTTTTAGAGGTGTCCAGTGTGAGGTGCAGCTGGTGGAGTCT
GGTGGTGGTCTTGTTCAACCTGGTGGTTCTCTTCGTCTTTCTTGTGCTGCTTCTGGTTTTAATATTAAAGATACTTAT
ATTCATTGGGTTCGTCAAGCTCCTGGTAAAGGTCTTGAATGGGTTGCTCGTATTTATCCTACTAATGGTTATACTCGT
TATGCTGATTCTGTTAAAGGTCGTTTTACTATTTCTGCTGATACTTCTAAAAATACTGCTTATCTTCAAATGAACTCT
CTTCGTGCTGAAGATACTGCTGTTTATTATTGTTCTCGTTGGGGTGGTGATGGTTTTTATGCTATGGATTATTGGGGT
CAAGGTACTCTTGTCACCGTCTCCTCAGCTAGCACCGGGGGAGGTGGGTCTGGAGGTGGAGGATCTGGTGGAGGTGGG
TCTGACATCCAGATGACCCAGTCTCCTTCTTCTCTTTCTGCTTCTGTTGGTGATCGTGTTACTATTACTTGTCGTGCT
TCTCAAGATGTTAATACTGCTGTTGCTTGGTATCAACAAAAACCTGGTAAAGCTCCTAAACTTCTTATTTATTCTGCT
TCTTTTCTTTATTCTGGTGTTCCTTCTCGTTTTTCTGGTTCTCGTTCTGGTACTGATTTTACTCTTACTATTTCTTCT
CTTCAACCTGAAGATTTTGCTACTTATTATTGTCAACAACATTATACTACTCCTCCTACTTTTGGTCAAGGTACCAAG
GTGGAGATCAAACGTACGGACAAAACTCACACATGCCCACCGTGCCCAGCACCTGAACTCCTGGGGGGACCGTCAGTC
TTCCTCTTCCCCCCAAAACCCAAGGACACCCTCATGATCTCCCGGACCCCTGAGGTCACATGCGTGGTGGTGGACGTG
AGCCACGAAGACCCTGAGGTCAAGTTCAACTGGTACGTGGACGGCGTGGAGGTGCATAATGCCAAGACAAAGCCGCGG
GAGGAGCAGTACAACAGCACGTACCGTGTGGTCAGCGTCCTCACCGTCCTGCACCAGGACTGGCTGAATGGCAAGGAG
TACAAGTGCAAGGTCTCCAACAAAGCCCTCCCAGCCCCCATCGAGAAAACCATCTCCAAAGCCAAAGGGCAGCCCCGA
GAACCACAGGTGTACACCCTGCCCCCATCCCGGGAGGAGATGACCAAGAACCAGGTCAGCCTGACCTGCCTGGTCAAA
GGCTTCTATCCCAGCGACATCGCCGTGGAGTGGGAGAGCAATGGGCAGCCGGAGAACAACTACAAGACCACGCCTCCC
GTGCTGGACTCCGACGGCTCCTTCTTCCTCTACAGCAAGCTCACCGTGGACAAGAGCAGGTGGCAGCAGGGGAACGTC
TTCTCATGCTCCGTGATGCACGAGGCTCTGCACAACCACTACACGCAGAAGAGCCTCTCCCTGTCTCCGGGT
SEQID NO. 304
ATGCCACCTCCTCGCCTCCTCTTCTTCCTCCTCTTCCTCACCCCCATGGAAGTCAGGCCCGAGGAACCTCTAGTGGTG
AAGGTGGAAGAGGGAGATAACGCTGTGCTGCAGTGCCTCAAGGGGACCTCAGATGGCCCCACTCAGCAGCTGACCTGG
TCTCGGGAGTCCCCGCTTAAACCCTTCTTAAAACTCAGCCTGGGGCTGCCAGGCCTGGGAATCCACATGAGGCCCCTG
GCCATCTGGCTTTTCATCTTCAACGTCTCTCAACAGATGGGGGGCTTCTACCTGTGCCAGCCGGGGCCCCCCTCTGAG
AAGGCCTGGCAGCCTGGCTGGACAGTCAATGTGGAGGGCAGCGGGGAGCTGTTCCGGTGGAATGTTTCGGACCTAGGT
GGCCTGGGCTGTGGCCTGAAGAACAGGTCCTCAGAGGGCCCCAGCTCCCCTTCCGGGAAGCTCATGAGCCCCAAGCTG
TATGTGTGGGCCAAAGACCGCCCTGAGATCTGGGAGGGAGAGCCTCCGTGTCTCCCACCGAGGGACAGCCTGAACCAG
AGCCTCAGCCAGGACCTCACCATGGCCCCTGGCTCCACACTCTGGCTGTCCTGTGGGGTACCCCCTGACTCTGTGTCC
AGGGGCCCCCTCTCCTGGACCCATGTGCACCCCAAGGGGCCTAAGTCATTGCTGAGCCTAGAGCTGAAGGACGATCGC
CCGGCCAGAGATATGTGGGTAATGGAGACGGGTCTGTTGTTGCCCCGGGCCACAGCTCAAGACGCTGGAAAGTATTAT
TGTCACCGTGGCAACCTGACCATGTCATTCCACCTGGAGATCACTGCTCGGCCAGGAGGAGGTGGGTCTGGAGGTGGA
GGATCTGGTGGAGGTGGGTCTGGAGGAGGTGGGTCTGGAGGAGGTGGGTCTGGAGGTGGAGGATCTGGTGGAGGTGGG
TCTATGGCCCAGGTCAAACTACAGGAGTCAGGGGCTGAGCTGGTGAAGCCTGGGGCCTCAGTGAAGATGTCCTGCAAG
GCTTCTGGCTACACATTTACCAGTTACAATATGCACTGGGTAAAGCAGACACCTGGACAGGGCCTGGAATGGATTGGA
GCTATTTATCCAGGAAATGGTGATACTTCCTACAATCAGAAGTTCAAAGGCAAGGCCACATTGACTGCAGACAAATCC
TCCAGCACAGCCTACATGCAGCTCAGCAGCCTGACATCTGAGGACTCTGCGGACTATTACTGTGCAAGATCTAATTAT
TACGGTAGTAGCTACTGGTTCTTCGATGTCTGGGGCCAAGGGACCACGGTCACCGTCTCCTCAGGTGGAGGCGGTTCA
GGCGGAGGTGGCTCTGGCGGTGGCGGATCGGACATCGAGCTCACTCAGTCTCCAACAATCCTGTCTGCATCTCCAGGG
GAGAAGGTCACAATGACTTGCAGGGCCAGCTCAAGTGTAAATTACATGGACTGGTACCAGAAGAAGCCAGGATCCTCC
CCCAAACCCTGGATTTATGCCACATCCAACCTGGCTTCTGGAGTCCCTGCTCGCTTCAGTGGCAGTGGGTCTGGGACC
TCTTACTCTCTCACAATCAGCAGAGTGGAGGCTGAAGATGCTGCCACTTATTACTGCCAGCAGTGGAGTTTTAATCCA
CCCACGTTCGGAGGGGGGACAAAGTTGGAAATAAAACGGGCCGCCGCTGGTGATCCCGCCGAGCCCAAATCTCCTGAC
AAAACTCACACATGCCCACCGTGCCCAGCACCTGAACTCCTGGGGGGACCGTCAGTCTTCCTCTTCCCCCCAAAACCC
AAGGACACCCTCATGATCTCCCGGACCCCTGAGGTCACATGCGTGGTGGTGGACGTGAGCCACGAAGACCCTGAGGTC
AAGTTCAACTGGTACGTGGACGGCGTGGAGGTGCATAATGCCAAGACAAAGCCGCGGGAGGAGCAGTACAACAGCACG
TACCGTGTGGTCAGCGTCCTCACCGTCCTGCACCAGGACTGGCTGAATGGCAAGGAGTACAAGTGCAAGGTCTCCAAC
AAAGCCCTCCCAGCCCCCATCGAGAAAACCATCTCCAAAGCCAAAGGGCAGCCCCGAGAACCACAGGTGTACACCCTG
CCCCCATCCCGGGAGGAGATGACCAAGAACCAGGTCAGCCTGACCTGCCTGGTCAAAGGCTTCTATCCCAGCGACATC
GCCGTGGAGTGGGAGAGCAATGGGCAGCCGGAGAACAACTACAAGACCACGCCTCCCGTGCTGGACTCCGACGGCTCC
TTCTTCCTCTACAGCAAGCTCACCGTGGACAAGAGCAGGTGGCAGCAGGGGAACGTCTTCTCATGCTCCGTGATGCAC
GAGGCTCTGCACAACCACTACACGCAGAAGAGCCTCTCCCTGTCTCCGGGT
SEQID NO. 305
ATGCCACCTCCTCGCCTCCTCTTCTTCCTCCTCTTCCTCACCCCCATGGAAGTCAGGCCCGAGGAACCTCTAGTGGTG
AAGGTGGAAGAGGGAGATAACGCTGTGCTGCAGTGCCTCAAGGGGACCTCAGATGGCCCCACTCAGCAGCTGACCTGG
TCTCGGGAGTCCCCGCTTAAACCCTTCTTAAAACTCAGCCTGGGGCTGCCAGGCCTGGGAATCCACATGAGGCCCCTG
GCCATCTGGCTTTTCATCTTCAACGTCTCTCAACAGATGGGGGGCTTCTACCTGTGCCAGCCGGGGCCCCCCTCTGAG
AAGGCCTGGCAGCCTGGCTGGACAGTCAATGTGGAGGGCAGCGGGGAGCTGTTCCGGTGGAATGTTTCGGACCTAGGT
GGCCTGGGCTGTGGCCTGAAGAACAGGTCCTCAGAGGGCCCCAGCTCCCCTTCCGGGAAGCTCATGAGCCCCAAGCTG
TATGTGTGGGCCAAAGACCGCCCTGAGATCTGGGAGGGAGAGCCTCCGTGTCTCCCACCGAGGGACAGCCTGAACCAG
AGCCTCAGCCAGGACCTCACCATGGCCCCTGGCTCCACACTCTGGCTGTCCTGTGGGGTACCCCCTGACTCTGTGTCC
AGGGGCCCCCTCTCCTGGACCCATGTGCACCCCAAGGGGCCTAAGTCATTGCTGAGCCTAGAGCTGAAGGACGATCGC
CCGGCCAGAGATATGTGGGTAATGGAGACGGGTCTGTTGTTGCCCCGGGCCACAGCTCAAGACGCTGGAAAGTATTAT
TGTCACCGTGGCAACCTGACCATGTCATTCCACCTGGAGATCACTGCTCGGCCAGGAGGAGGTGGGTCTGGAGGTGGA
GGATCTGGTGGAGGTGGGTCTGGAGGAGGTGGGTCTGGAGGAGGTGGGTCTGGAGGTGGAGGATCTGGTGGAGGTGGG
TCTATGGCCCAGGTCAAACTACAGGAGTCAGGGGCTGAGCTGGTGAAGCCTGGGGCCTCAGTGAAGATGTCCTGCAAG
GCTTCTGGCTACACATTTACCAGTTACAATATGCACTGGGTAAAGCAGACACCTGGACAGGGCCTGGAATGGATTGGA
GCTATTTATCCAGGAAATGGTGATACTTCCTACAATCAGAAGTTCAAAGGCAAGGCCACATTGACTGCAGACAAATCC
TCCAGCACAGCCTACATGCAGCTCAGCAGCCTGACATCTGAGGACTCTGCGGACTATTACTGTGCAAGATCTAATTAT
TACGGTAGTAGCTACTGGTTCTTCGATGTCTGGGGCCAAGGGACCACGGTCACCGTCTCCTCAGGTGGAGGCGGTTCA
GGCGGAGGTGGCTCTGGCGGTGGCGGATCGGACATCGAGCTCACTCAGTCTCCAACAATCCTGTCTGCATCTCCAGGG
GAGAAGGTCACAATGACTTGCAGGGCCAGCTCAAGTGTAAATTACATGGACTGGTACCAGAAGAAGCCAGGATCCTCC
CCCAAACCCTGGATTTATGCCACATCCAACCTGGCTTCTGGAGTCCCTGCTCGCTTCAGTGGCAGTGGGTCTGGGACC
TCTTACTCTCTCACAATCAGCAGAGTGGAGGCTGAAGATGCTGCCACTTATTACTGCCAGCAGTGGAGTTTTAATCCA
CCCACGTTCGGAGGGGGGACAAAGTTGGAAATAAAACGGGCCGCCGCTCATCATCACCATCACCAT
SEQID NO. 306
ATGCCACCTCCTCGCCTCCTCTTCTTCCTCCTCTTCCTCACCCCCATGGAAGTCAGGCCCGAGGAACCTCTAGTGGTG
AAGGTGGAAGAGGGAGATAACGCTGTGCTGCAGTGCCTCAAGGGGACCTCAGATGGCCCCACTCAGCAGCTGACCTGG
TCTCGGGAGTCCCCGCTTAAACCCTTCTTAAAACTCAGCCTGGGGCTGCCAGGCCTGGGAATCCACATGAGGCCCCTG
GCCATCTGGCTTTTCATCTTCAACGTCTCTCAACAGATGGGGGGCTTCTACCTGTGCCAGCCGGGGCCCCCCTCTGAG
AAGGCCTGGCAGCCTGGCTGGACAGTCAATGTGGAGGGCAGCGGGGAGCTGTTCCGGTGGAATGTTTCGGACCTAGGT
GGCCTGGGCTGTGGCCTGAAGAACAGGTCCTCAGAGGGCCCCAGCTCCCCTTCCGGGAAGCTCATGAGCCCCAAGCTG
TATGTGTGGGCCAAAGACCGCCCTGAGATCTGGGAGGGAGAGCCTCCGTGTCTCCCACCGAGGGACAGCCTGAACCAG
AGCCTCAGCCAGGACCTCACCATGGCCCCTGGCTCCACACTCTGGCTGTCCTGTGGGGTACCCCCTGACTCTGTGTCC
AGGGGCCCCCTCTCCTGGACCCATGTGCACCCCAAGGGGCCTAAGTCATTGCTGAGCCTAGAGCTGAAGGACGATCGC
CCGGCCAGAGATATGTGGGTAATGGAGACGGGTCTGTTGTTGCCCCGGGCCACAGCTCAAGACGCTGGAAAGTATTAT
TGTCACCGTGGCAACCTGACCATGTCATTCCACCTGGAGATCACTGCTCGGCCAGATCCCGCCGAGCCCAAATCTCCT
GACAAAACTCACACATGCCCACCGTGCCCAGCACCTGAACTCCTGGGGGGACCGTCAGTCTTCCTCTTCCCCCCAAAA
CCCAAGGACACCCTCATGATCTCCCGGACCCCTGAGGTCACATGCGTGGTGGTGGACGTGAGCCACGAAGACCCTGAG
GTCAAGTTCAACTGGTACGTGGACGGCGTGGAGGTGCATAATGCCAAGACAAAGCCGCGGGAGGAGCAGTACAACAGC
ACGTACCGTGTGGTCAGCGTCCTCACCGTCCTGCACCAGGACTGGCTGAATGGCAAGGAGTACAAGTGCAAGGTCTCC
AACAAAGCCCTCCCAGCCCCCATCGAGAAAACCATCTCCAAAGCCAAAGGGCAGCCCCGAGAACCACAGGTGTACACC
CTGCCCCCATCCCGGGAGGAGATGACCAAGAACCAGGTCAGCCTGACCTGCCTGGTCAAAGGCTTCTATCCCAGCGAC
ATCGCCGTGGAGTGGGAGAGCAATGGGCAGCCGGAGAACAACTACAAGACCACGCCTCCCGTGCTGGACTCCGACGGC
TCCTTCTTCCTCTACAGCAAGCTCACCGTGGACAAGAGCAGGTGGCAGCAGGGGAACGTCTTCTCATGCTCCGTGATG
CACGAGGCTCTGCACAACCACTACACGCAGAAGAGCCTCTCCCTGTCTCCGGGTGGAGGAGGTGGGTCTGGAGGTGGA
GGATCTGGTGGAGGTGGGTCTGGAGGAGGTGGGTCTATGGCCCAGGTCAAACTACAGGAGTCAGGGGCTGAGCTGGTG
AAGCCTGGGGCCTCAGTGAAGATGTCCTGCAAGGCTTCTGGCTACACATTTACCAGTTACAATATGCACTGGGTAAAG
CAGACACCTGGACAGGGCCTGGAATGGATTGGAGCTATTTATCCAGGAAATGGTGATACTTCCTACAATCAGAAGTTC
AAAGGCAAGGCCACATTGACTGCAGACAAATCCTCCAGCACAGCCTACATGCAGCTCAGCAGCCTGACATCTGAGGAC
TCTGCGGACTATTACTGTGCAAGATCTAATTATTACGGTAGTAGCTACTGGTTCTTCGATGTCTGGGGCCAAGGGACC
ACGGTCACCGTCTCCTCAGGTGGAGGCGGTTCAGGCGGAGGTGGCTCTGGCGGTGGCGGATCGGACATCGAGCTCACT
CAGTCTCCAACAATCCTGTCTGCATCTCCAGGGGAGAAGGTCACAATGACTTGCAGGGCCAGCTCAAGTGTAAATTAC
ATGGACTGGTACCAGAAGAAGCCAGGATCCTCCCCCAAACCCTGGATTTATGCCACATCCAACCTGGCTTCTGGAGTC
CCTGCTCGCTTCAGTGGCAGTGGGTCTGGGACCTCTTACTCTCTCACAATCAGCAGAGTGGAGGCTGAAGATGCTGCC
ACTTATTACTGCCAGCAGTGGAGTTTTAATCCACCCACGTTCGGAGGGGGGACAAAGTTGGAAATAAAACGGGCT
SEQID NO. 307
ATGGATTTTCAGGTGCAGATTTTCAGCTTCCTGCTAATCAGTGCCTCAGTCATAATGTCTAGAATGGCCCAGGTCAAA
CTACAGGAGTCAGGGGCTGAGCTGGTGAAGCCTGGGGCCTCAGTGAAGATGTCCTGCAAGGCTTCTGGCTACACATTT
ACCAGTTACAATATGCACTGGGTAAAGCAGACACCTGGACAGGGCCTGGAATGGATTGGAGCTATTTATCCAGGAAAT
GGTGATACTTCCTACAATCAGAAGTTCAAAGGCAAGGCCACATTGACTGCAGACAAATCCTCCAGCACAGCCTACATG
CAGCTCAGCAGCCTGACATCTGAGGACTCTGCGGACTATTACTGTGCAAGATCTAATTATTACGGTAGTAGCTACTGG
TTCTTCGATGTCTGGGGCCAAGGGACCACGGTCACCGTCTCCTCAGGTGGAGGCGGTTCAGGCGGAGGTGGCTCTGGC
GGTGGCGGATCGGACATCGAGCTCACTCAGTCTCCAACAATCCTGTCTGCATCTCCAGGGGAGAAGGTCACAATGACT
TGCAGGGCCAGCTCAAGTGTAAATTACATGGACTGGTACCAGAAGAAGCCAGGATCCTCCCCCAAACCCTGGATTTAT
GCCACATCCAACCTGGCTTCTGGAGTCCCTGCTCGCTTCAGTGGCAGTGGGTCTGGGACCTCTTACTCTCTCACAATC
AGCAGAGTGGAGGCTGAAGATGCTGCCACTTATTACTGCCAGCAGTGGAGTTTTAATCCACCCACGTTCGGAGGGGGG
ACAAAGTTGGAAATAAAACGGGCCGCCGCTGGAGGAGGTGGGTCTGGAGGTGGAGGATCTGGTGGAGGTGGGTCTGGA
GGAGGTGGGTCTCCCGAGGAACCTCTAGTGGTGAAGGTGGAAGAGGGAGATAACGCTGTGCTGCAGTGCCTCAAGGGG
ACCTCAGATGGCCCCACTCAGCAGCTGACCTGGTCTCGGGAGTCCCCGCTTAAACCCTTCTTAAAACTCAGCCTGGGG
CTGCCAGGCCTGGGAATCCACATGAGGCCCCTGGCCATCTGGCTTTTCATCTTCAACGTCTCTCAACAGATGGGGGGC
TTCTACCTGTGCCAGCCGGGGCCCCCCTCTGAGAAGGCCTGGCAGCCTGGCTGGACAGTCAATGTGGAGGGCAGCGGG
GAGCTGTTCCGGTGGAATGTTTCGGACCTAGGTGGCCTGGGCTGTGGCCTGAAGAACAGGTCCTCAGAGGGCCCCAGC
TCCCCTTCCGGGAAGCTCATGAGCCCCAAGCTGTATGTGTGGGCCAAAGACCGCCCTGAGATCTGGGAGGGAGAGCCT
CCGTGTCTCCCACCGAGGGACAGCCTGAACCAGAGCCTCAGCCAGGACCTCACCATGGCCCCTGGCTCCACACTCTGG
CTGTCCTGTGGGGTACCCCCTGACTCTGTGTCCAGGGGCCCCCTCTCCTGGACCCATGTGCACCCCAAGGGGCCTAAG
TCATTGCTGAGCCTAGAGCTGAAGGACGATCGCCCGGCCAGAGATATGTGGGTAATGGAGACGGGTCTGTTGTTGCCC
CGGGCCACAGCTCAAGACGCTGGAAAGTATTATTGTCACCGTGGCAACCTGACCATGTCATTCCACCTGGAGATCACT
GCTCGGCCAGATCCCGCCGAGCCCAAATCTCCTGACAAAACTCACACATGCCCACCGTGCCCAGCACCTGAACTCCTG
GGGGGACCGTCAGTCTTCCTCTTCCCCCCAAAACCCAAGGACACCCTCATGATCTCCCGGACCCCTGAGGTCACATGC
GTGGTGGTGGACGTGAGCCACGAAGACCCTGAGGTCAAGTTCAACTGGTACGTGGACGGCGTGGAGGTGCATAATGCC
AAGACAAAGCCGCGGGAGGAGCAGTACAACAGCACGTACCGTGTGGTCAGCGTCCTCACCGTCCTGCACCAGGACTGG
CTGAATGGCAAGGAGTACAAGTGCAAGGTCTCCAACAAAGCCCTCCCAGCCCCCATCGAGAAAACCATCTCCAAAGCC
AAAGGGCAGCCCCGAGAACCACAGGTGTACACCCTGCCCCCATCCCGGGAGGAGATGACCAAGAACCAGGTCAGCCTG
ACCTGCCTGGTCAAAGGCTTCTATCCCAGCGACATCGCCGTGGAGTGGGAGAGCAATGGGCAGCCGGAGAACAACTAC
AAGACCACGCCTCCCGTGCTGGACTCCGACGGCTCCTTCTTCCTCTACAGCAAGCTCACCGTGGACAAGAGCAGGTGG
CAGCAGGGGAACGTCTTCTCATGCTCCGTGATGCACGAGGCTCTGCACAACCACTACACGCAGAAGAGCCTCTCCCTG
TCTCCGGGT
SEQID NO. 308
ATGCTCAGGCTGCTCTTGGCTCTCAACTTATTCCCTTCAATTCAAGTAACAGGAGACATCCAGATGACACAGACTACA
TCCTCCCTGTCTGCCTCTCTGGGAGACAGAGTCACCATCAGTTGCAGGGCAAGTCAGGACATTAGTAAATATTTAAAT
TGGTATCAGCAGAAACCAGATGGAACTGTTAAACTCCTGATCTACCATACATCAAGATTACACTCAGGAGTCCCATCA
AGGTTCAGTGGCAGTGGGTCTGGAACAGATTATTCTCTCACCATTAGCAACCTGGAGCAAGAAGATATTGCCACTTAC
TTTTGCCAACAGGGTAATACGCTTCCGTACACGTTCGGAGGGGGGACTAAGTTGGAAATAACAGGAGGAGGTGGGTCT
GGAGGTGGAGGATCTGGTGGAGGTGGGTCTGGAGGAGGTGGGTCTGAGGTGAAACTGCAGGAGTCAGGACCTGGCCTG
GTGGCGCCCTCACAGAGCCTGTCCGTCACATGCACTGTCTCAGGGGTCTCATTACCCGACTATGGTGTAAGCTGGATT
CGCCAGCCTCCACGAAAGGGTCTGGAGTGGCTGGGAGTAATATGGGGTAGTGAAACCACATACTATAATTCAGCTCTC
AAATCCAGACTGACCATCATCAAGGACAACTCCAAGAGCCAAGTTTTCTTAAAAATGAACAGTCTGCAAACTGATGAC
ACAGCCATTTACTACTGTGCCAAACATTATTACTACGGTGGTAGCTATGCTATGGACTACTGGGGTCAAGGAACCTCA
GTCACCGTCTCCTCAGACTACAAAGACGATGACGACAAGATTGAAGTTATGTATCCTCCTCCTTACCTAGACAATGAG
AAGAGCAATGGAACCATTATCCATGTGAAAGGGAAACACCTTTGTCCAAGTCCCCTATTTCCCGGACCTTCTAAGCCC
TTTTGGGTGCTGGTGGTGGTTGGTGGAGTCCTGGCTTGCTATAGCTTGCTAGTAACAGTGGCCTTTATTATTTTCTGG
GTGAGGAGTAAGAGGAGCAGGCTCCTGCACAGTGACTACATGAACATGACTCCCCGCCGCCCCGGGCCCACCCGCAAG
CATTACCAGCCCTATGCCCCACCACGCGACTTCGCAGCCTATCGCTCCAAACGGGGCAGAAAGAAACTCCTGTATATA
TTCAAACAACCATTTATGAGACCAGTACAAACTACTCAAGAGGAAGATGGCTGTAGCTGCCGATTTCCAGAAGAAGAA
GAAGGAGGATGTGAACTGAGAGTGAAGTTCAGCAGGAGCGCAGACGCCCCCGCGTACCAGCAGGGCCAGAACCAGCTC
TATAACGAGCTCAATCTAGGACGAAGAGAGGAGTACGATGTTTTGGACAAGAGACGTGGCCGGGACCCTGAGATGGGG
GGAAAGCCGCAGAGAAGGAAGAACCCTCAGGAAGGCCTGTACAATGAACTGCAGAAAGATAAGATGGCGGAGGCCTAC
AGTGAGATTGGGATGAAAGGCGAGCGCCGGAGGGGCAAGGGGCACGATGGCCTTTACCAGGGTCTCAGTACAGCCACC
AAGGACACCTACGACGCCCTTCACATGCAGGCCCTGCCCCCTCGCGAGGGCAGAGGAAGTCTTCTAACATGCGGTGAC
GTGGAGGAGAATCCCGGCCCTATGCCACCTCCTCGCCTCCTCTTCTTCCTCCTCTTCCTCACCCCCATGGAAGTCAGG
CCCGAGGAACCTCTAGTGGTGAAGGTGGAAGAGGGAGATAACGCTGTGCTGCAGTGCCTCAAGGGGACCTCAGATGGC
CCCACTCAGCAGCTGACCTGGTCTCGGGAGTCCCCGCTTAAACCCTTCTTAAAACTCAGCCTGGGGCTGCCAGGCCTG
GGAATCCACATGAGGCCCCTGGCCATCTGGCTTTTCATCTTCAACGTCTCTCAACAGATGGGGGGCTTCTACCTGTGC
CAGCCGGGGCCCCCCTCTGAGAAGGCCTGGCAGCCTGGCTGGACAGTCAATGTGGAGGGCAGCGGGGAGCTGTTCCGG
TGGAATGTTTCGGACCTAGGTGGCCTGGGCTGTGGCCTGAAGAACAGGTCCTCAGAGGGCCCCAGCTCCCCTTCCGGG
AAGCTCATGAGCCCCAAGCTGTATGTGTGGGCCAAAGACCGCCCTGAGATCTGGGAGGGAGAGCCTCCGTGTCTCCCA
CCGAGGGACAGCCTGAACCAGAGCCTCAGCCAGGACCTCACCATGGCCCCTGGCTCCACACTCTGGCTGTCCTGTGGG
GTACCCCCTGACTCTGTGTCCAGGGGCCCCCTCTCCTGGACCCATGTGCACCCCAAGGGGCCTAAGTCATTGCTGAGC
CTAGAGCTGAAGGACGATCGCCCGGCCAGAGATATGTGGGTAATGGAGACGGGTCTGTTGTTGCCCCGGGCCACAGCT
CAAGACGCTGGAAAGTATTATTGTCACCGTGGCAACCTGACCATGTCATTCCACCTGGAGATCACTGCTCGGCCAGGG
GGAGGTGGGTCTGGAGGTGGAGGATCTGGTGGAGGTGGGTCTGGTGGAGGTGGGTCTGAGGTGCAGCTGGTGGAGTCT
GGTGGTGGTCTTGTTCAACCTGGTGGTTCTCTTCGTCTTTCTTGTGCTGCTTCTGGTTTTAATATTAAAGATACTTAT
ATTCATTGGGTTCGTCAAGCTCCTGGTAAAGGTCTTGAATGGGTTGCTCGTATTTATCCTACTAATGGTTATACTCGT
TATGCTGATTCTGTTAAAGGTCGTTTTACTATTTCTGCTGATACTTCTAAAAATACTGCTTATCTTCAAATGAACTCT
CTTCGTGCTGAAGATACTGCTGTTTATTATTGTTCTCGTTGGGGTGGTGATGGTTTTTATGCTATGGATTATTGGGGT
CAAGGTACTCTTGTCACCGTCTCCTCAGCTAGCACCGGGGGAGGTGGGTCTGGAGGTGGAGGATCTGGTGGAGGTGGG
TCTGACATCCAGATGACCCAGTCTCCTTCTTCTCTTTCTGCTTCTGTTGGTGATCGTGTTACTATTACTTGTCGTGCT
TCTCAAGATGTTAATACTGCTGTTGCTTGGTATCAACAAAAACCTGGTAAAGCTCCTAAACTTCTTATTTATTCTGCT
TCTTTTCTTTATTCTGGTGTTCCTTCTCGTTTTTCTGGTTCTCGTTCTGGTACTGATTTTACTCTTACTATTTCTTCT
CTTCAACCTGAAGATTTTGCTACTTATTATTGTCAACAACATTATACTACTCCTCCTACTTTTGGTCAAGGTACCAAG
GTGGAGATCAAACGTACGTCTAGACATCATCACCATCACCAT
SEQID NO. 309
ATGCCACCTCCTCGCCTCCTCTTCTTCCTCCTCTTCCTCACCCCCATGGAAGTCAGGCCCGAGGAACCTCTAGTGGTG
AAGGTGGAAGAGGGAGATAACGCTGTGCTGCAGTGCCTCAAGGGGACCTCAGATGGCCCCACTCAGCAGCTGACCTGG
TCTCGGGAGTCCCCGCTTAAACCCTTCTTAAAACTCAGCCTGGGGCTGCCAGGCCTGGGAATCCACATGAGGCCCCTG
GCCATCTGGCTTTTCATCTTCAACGTCTCTCAACAGATGGGGGGCTTCTACCTGTGCCAGCCGGGGCCCCCCTCTGAG
AAGGCCTGGCAGCCTGGCTGGACAGTCAATGTGGAGGGCAGCGGGGAGCTGTTCCGGTGGAATGTTTCGGACCTAGGT
GGCCTGGGCTGTGGCCTGAAGAACAGGTCCTCAGAGGGCCCCAGCTCCCCTTCCGGGAAGCTCATGAGCCCCAAGCTG
TATGTGTGGGCCAAAGACCGCCCTGAGATCTGGGAGGGAGAGCCTCCGTGTCTCCCACCGAGGGACAGCCTGAACCAG
AGCCTCAGCCAGGACCTCACCATGGCCCCTGGCTCCACACTCTGGCTGTCCTGTGGGGTACCCCCTGACTCTGTGTCC
AGGGGCCCCCTCTCCTGGACCCATGTGCACCCCAAGGGGCCTAAGTCATTGCTGAGCCTAGAGCTGAAGGACGATCGC
CCGGCCAGAGATATGTGGGTAATGGAGACGGGTCTGTTGTTGCCCCGGGCCACAGCTCAAGACGCTGGAAAGTATTAT
TGTCACCGTGGCAACCTGACCATGTCATTCCACCTGGAGATCACTGCTCGGCCAGGGGGAGGTGGGTCTGGAGGTGGA
GGATCTGGTGGAGGTGGGTCTGGTGGAGGTGGGTCTGAGGTGCAGCTGGTGGAGTCTGGTGGTGGTCTTGTTCAACCT
GGTGGTTCTCTTCGTCTTTCTTGTGCTGCTTCTGGTTTTAATATTAAAGATACTTATATTCATTGGGTTCGTCAAGCT
CCTGGTAAAGGTCTTGAATGGGTTGCTCGTATTTATCCTACTAATGGTTATACTCGTTATGCTGATTCTGTTAAAGGT
CGTTTTACTATTTCTGCTGATACTTCTAAAAATACTGCTTATCTTCAAATGAACTCTCTTCGTGCTGAAGATACTGCT
GTTTATTATTGTTCTCGTTGGGGTGGTGATGGTTTTTATGCTATGGATTATTGGGGTCAAGGTACTCTTGTCACCGTC
TCCTCAGCTAGCACCGGGGGAGGTGGGTCTGGAGGTGGAGGATCTGGTGGAGGTGGGTCTGACATCCAGATGACCCAG
TCTCCTTCTTCTCTTTCTGCTTCTGTTGGTGATCGTGTTACTATTACTTGTCGTGCTTCTCAAGATGTTAATACTGCT
GTTGCTTGGTATCAACAAAAACCTGGTAAAGCTCCTAAACTTCTTATTTATTCTGCTTCTTTTCTTTATTCTGGTGTT
CCTTCTCGTTTTTCTGGTTCTCGTTCTGGTACTGATTTTACTCTTACTATTTCTTCTCTTCAACCTGAAGATTTTGCT
ACTTATTATTGTCAACAACATTATACTACTCCTCCTACTTTTGGTCAAGGTACCAAGGTGGAGATCAAACGTACGTCT
AGACATCATCACCATCACCATGAGGGCAGAGGAAGTCTTCTAACATGCGGTGACGTGGAGGAGAATCCCGGCCCTATG
CTCAGGCTGCTCTTGGCTCTCAACTTATTCCCTTCAATTCAAGTAACAGGAGACATCCAGATGACACAGACTACATCC
TCCCTGTCTGCCTCTCTGGGAGACAGAGTCACCATCAGTTGCAGGGCAAGTCAGGACATTAGTAAATATTTAAATTGG
TATCAGCAGAAACCAGATGGAACTGTTAAACTCCTGATCTACCATACATCAAGATTACACTCAGGAGTCCCATCAAGG
TTCAGTGGCAGTGGGTCTGGAACAGATTATTCTCTCACCATTAGCAACCTGGAGCAAGAAGATATTGCCACTTACTTT
TGCCAACAGGGTAATACGCTTCCGTACACGTTCGGAGGGGGGACTAAGTTGGAAATAACAGGAGGAGGTGGGTCTGGA
GGTGGAGGATCTGGTGGAGGTGGGTCTGGAGGAGGTGGGTCTGAGGTGAAACTGCAGGAGTCAGGACCTGGCCTGGTG
GCGCCCTCACAGAGCCTGTCCGTCACATGCACTGTCTCAGGGGTCTCATTACCCGACTATGGTGTAAGCTGGATTCGC
CAGCCTCCACGAAAGGGTCTGGAGTGGCTGGGAGTAATATGGGGTAGTGAAACCACATACTATAATTCAGCTCTCAAA
TCCAGACTGACCATCATCAAGGACAACTCCAAGAGCCAAGTTTTCTTAAAAATGAACAGTCTGCAAACTGATGACACA
GCCATTTACTACTGTGCCAAACATTATTACTACGGTGGTAGCTATGCTATGGACTACTGGGGTCAAGGAACCTCAGTC
ACCGTCTCCTCAGACTACAAAGACGATGACGACAAGATTGAAGTTATGTATCCTCCTCCTTACCTAGACAATGAGAAG
AGCAATGGAACCATTATCCATGTGAAAGGGAAACACCTTTGTCCAAGTCCCCTATTTCCCGGACCTTCTAAGCCCTTT
TGGGTGCTGGTGGTGGTTGGTGGAGTCCTGGCTTGCTATAGCTTGCTAGTAACAGTGGCCTTTATTATTTTCTGGGTG
AGGAGTAAGAGGAGCAGGCTCCTGCACAGTGACTACATGAACATGACTCCCCGCCGCCCCGGGCCCACCCGCAAGCAT
TACCAGCCCTATGCCCCACCACGCGACTTCGCAGCCTATCGCTCCAAACGGGGCAGAAAGAAACTCCTGTATATATTC
AAACAACCATTTATGAGACCAGTACAAACTACTCAAGAGGAAGATGGCTGTAGCTGCCGATTTCCAGAAGAAGAAGAA
GGAGGATGTGAACTGAGAGTGAAGTTCAGCAGGAGCGCAGACGCCCCCGCGTACCAGCAGGGCCAGAACCAGCTCTAT
AACGAGCTCAATCTAGGACGAAGAGAGGAGTACGATGTTTTGGACAAGAGACGTGGCCGGGACCCTGAGATGGGGGGA
AAGCCGCAGAGAAGGAAGAACCCTCAGGAAGGCCTGTACAATGAACTGCAGAAAGATAAGATGGCGGAGGCCTACAGT
GAGATTGGGATGAAAGGCGAGCGCCGGAGGGGCAAGGGGCACGATGGCCTTTACCAGGGTCTCAGTACAGCCACCAAG
GACACCTACGACGCCCTTCACATGCAGGCCCTGCCCCCTCGC
SEQID NO. 310
GATATCGAATTAGGAGGAAAACTGTTTCATACAGAAGGCGTCAATTAGGAGGAAAAACTGTTTCATACAGAAGGCGTC
AATTAGGAGGAAAAACTGTTTCATACAGAAGGCGTCAATTGGTCCCATCGAATTAGGAGGAAAAACTGTTTCATACAG
AAGGCGTCAATTAGGAGGAAAAACTGTTTCATACAGAAGGCGTCAATTAGGAGGAAAAACTGTTTCATACAGAAGGCG
TCAATTGGTCCCGGGACATTTTGACACCCCCATAATATTTTTCCAGAATTAACAGTATAAATTGCATCTCTTGTTCAA
GAGTTCCCTATCACTCTCTTTAATCACTACTCACAGTAACCTCAACTCCTGGCGGCCGCGCCACCATGCCACCTCCTC
GCCTCCTCTTCTTCCTCCTCTTCCTCACCCCCATGGAAGTCAGGCCCGAGGAACCTCTAGTGGTGAAGGTGGAAGAGG
GAGATAACGCTGTGCTGCAGTGCCTCAAGGGGACCTCAGATGGCCCCACTCAGCAGCTGACTTGGTCTCGGGAGTCCC
CGCTTAAACCCTTCTTAAAACTCAGCCTGGGGCTGCCAGGCCTGGGAATCCACATGAGGCCCCTGGCCATCTGGCTTT
TCATCTTCAACGTCTCTCAACAGATGGGGGGCTTCTACCTGTGCCAGCCGGGGCCCCCCTCTGAGAAGGCCTGGCAGC
CTGGCTGGACAGTCAATGTGGAGGGCAGCGGGGAGCTGTTCCGGTGGAATGTTTCGGACCTAGGTGGCCTGGGCTGTG
GCCTGAAGAACAGGTCCTCAGAGGGCCCCAGCTCCCCTTCCGGGAAGCTCATGAGCCCCAAGCTGTATGTGTGGGCCA
AAGACCGCCCTGAGATCTGGGAGGGAGAGCCTCCGTGTCTCCCACCGAGGGACAGCCTGAACCAGAGCCTCAGCCAGG
ACCTCACCATGGCCCCTGGCTCCACACTCTGGCTGTCCTGTGGGGTACCCCCTGACTCTGTGTCCAGGGGCCCCCTCT
CCTGGACCCATGTGCACCCCAAGGGGCCTAAGTCATTGCTGAGCCTAGAGCTGAAGGACGATCGCCCGGCCAGAGATA
TGTGGGTAATGGAGACGGGTCTGTTGTTGCCCCGGGCCACAGCTCAAGACGCTGGAAAGTATTATTGTCACCGTGGCA
ACCTGACCATGTCATTCCACCTGGAGATCACTGCTCGGCCAGGGGGAGGTGGGTCTGGAGGTGGAGGATCTGGTGGAG
GTGGGTCTGGTGGAGGTGGGTCTGAGGTGCAGCTGGTGGAGTCTGGTGGTGGTCTTGTTCAACCCGGTGGTTCTCTTC
GTCTTTCTTGTGCTGCTTCTGGTTTTAATATTAAAGATACTTATATTCATTGGGTTCGTCAAGCTCCTGGTAAAGGTC
TTGAATGGGTTGCTCGTATTTATCCTACTAATGGTTATACTCGTTATGCTGATTCTGTTAAAGGTCGTTTTACTATTT
CTGCTGATACTTCTAAAAATACTGCTTATCTTCAAATGAACTCTCTTCGTGCTGAAGATACTGCTGTTTATTATTGTT
CTCGTTGGGGTGGTGATGGTTTTTATGCTATGGATTATTGGGGTCAAGGTACTCTTGTCACCGTCTCCTCAGCTAGCA
CCGGGGGAGGTGGGTCTGGAGGTGGAGGATCTGGTGGAGGTGGGTCTGACATCCAGATGACCCAGTCTCCTTCTTCTC
TTTCTGCTTCTGTTGGTGATCGTGTTACTATTACTTGTCGTGCTTCTCAAGATGTTAATACTGCTGTTGCTTGGTATC
AACAAAAACCCGGTAAAGCTCCTAAACTTCTTATTTATTCTGCTTCTTTTCTTTATTCTGGTGTTCCTTCTCGTTTTT
CTGGTTCTCGTTCTGGTACTGATTTTACTCTTACTATTTCTTCTCTTCAACCTGAAGATTTTGCTACTTATTATTGTC
AACAACATTATACTACTCCTCCTACTTTTGGTCAAGGTACCAAGGTGGAGATCAAACGTACGCATCATCACCATCACC
AT
SEQID NO. 311
ATGCCACCTCCTCGCCTCCTCTTCTTCCTCCTCTTCCTCACCCCCATGGAAGTCAGGCCCGAGGAACCTCTAGTGGTG
AAGGTGGAAGAGGGAGATAACGCTGTGCTGCAGTGCCTCAAGGGGACCTCAGATGGCCCCACTCAGCAGCTGACCTGG
TCTCGGGAGTCCCCGCTTAAACCCTTCTTAAAACTCAGCCTGGGGCTGCCAGGCCTGGGAATCCACATGAGGCCCCTG
GCCATCTGGCTTTTCATCTTCAACGTCTCTCAACAGATGGGGGGCTTCTACCTGTGCCAGCCGGGGCCCCCCTCTGAG
AAGGCCTGGCAGCCTGGCTGGACAGTCAATGTGGAGGGCAGCGGGGAGCTGTTCCGGTGGAATGTTTCGGACCTAGGT
GGCCTGGGCTGTGGCCTGAAGAACAGGTCCTCAGAGGGCCCCAGCTCCCCTTCCGGGAAGCTCATGAGCCCCAAGCTG
TATGTGTGGGCCAAAGACCGCCCTGAGATCTGGGAGGGAGAGCCTCCGTGTCTCCCACCGAGGGACAGCCTGAACCAG
AGCCTCAGCCAGGACCTCACCATGGCCCCTGGCTCCACACTCTGGCTGTCCTGTGGGGTACCCCCTGACTCTGTGTCC
AGGGGCCCCCTCTCCTGGACCCATGTGCACCCCAAGGGGCCTAAGTCATTGCTGAGCCTAGAGCTGAAGGACGATCGC
CCGGCCAGAGATATGTGGGTAATGGAGACGGGTCTGTTGTTGCCCCGGGCCACAGCTCAAGACGCTGGAAAGTATTAT
TGTCACCGTGGCAACCTGACCATGTCATTCCACCTGGAGATCACTGCTCGGCCAGGGGGAGGTGGGTCTGGAGGTGGA
GGATCTGGTGGAGGTGGGTCTGGTGGAGGTGGGTCTGAGGTGCAGCTGGTGGAGTCTGGTGGTGGTCTTGTTCAACCT
GGTGGTTCTCTTCGTCTTTCTTGTGCTGCTTCTGGTTTTAATATTAAAGATACTTATATTCATTGGGTTCGTCAAGCT
CCTGGTAAAGGTCTTGAATGGGTTGCTCGTATTTATCCTACTAATGGTTATACTCGTTATGCTGATTCTGTTAAAGGT
CGTTTTACTATTTCTGCTGATACTTCTAAAAATACTGCTTATCTTCAAATGAACTCTCTTCGTGCTGAAGATACTGCT
GTTTATTATTGTTCTCGTTGGGGTGGTGATGGTTTTTATGCTATGGATTATTGGGGTCAAGGTACTCTTGTCACCGTC
TCCTCAGCTAGCACCGGGGGAGGTGGGTCTGGAGGTGGAGGATCTGGTGGAGGTGGGTCTGACATCCAGATGACCCAG
TCTCCTTCTTCTCTTTCTGCTTCTGTTGGTGATCGTGTTACTATTACTTGTCGTGCTTCTCAAGATGTTAATACTGCT
GTTGCTTGGTATCAACAAAAACCTGGTAAAGCTCCTAAACTTCTTATTTATTCTGCTTCTTTTCTTTATTCTGGTGTT
CCTTCTCGTTTTTCTGGTTCTCGTTCTGGTACTGATTTTACTCTTACTATTTCTTCTCTTCAACCTGAAGATTTTGCT
ACTTATTATTGTCAACAACATTATACTACTCCTCCTACTTTTGGTCAAGGTACCAAGGTGGAGATCAAACGTACGCAC
CACCATCACCACCAT
SEQID NO. 312
ATGCCACCTCCTCGCCTCCTCTTCTTCCTCCTCTTCCTCACCCCCATGGAAGTCAGGCCCGAGGAACCTCTAGTGGTG
AAGGTGGAAGAGGGAGATAACGCTGTGCTGCAGTGCCTCAAGGGGACCTCAGATGGCCCCACTCAGCAGCTGACCTGG
TCTCGGGAGTCCCCGCTTAAACCCTTCTTAAAACTCAGCCTGGGGCTGCCAGGCCTGGGAATCCACATGAGGCCCCTG
GCCATCTGGCTTTTCATCTTCAACGTCTCTCAACAGATGGGGGGCTTCTACCTGTGCCAGCCGGGGCCCCCCTCTGAG
AAGGCCTGGCAGCCTGGCTGGACAGTCAATGTGGAGGGCAGCGGGGAGCTGTTCCGGTGGAATGTTTCGGACCTAGGT
GGCCTGGGCTGTGGCCTGAAGAACAGGTCCTCAGAGGGCCCCAGCTCCCCTTCCGGGAAGCTCATGAGCCCCAAGCTG
TATGTGTGGGCCAAAGACCGCCCTGAGATCTGGGAGGGAGAGCCTCCGTGTCTCCCACCGAGGGACAGCCTGAACCAG
AGCCTCAGCCAGGACCTCACCATGGCCCCTGGCTCCACACTCTGGCTGTCCTGTGGGGTACCCCCTGACTCTGTGTCC
AGGGGCCCCCTCTCCTGGACCCATGTGCACCCCAAGGGGCCTAAGTCATTGCTGAGCCTAGAGCTGAAGGACGATCGC
CCGGCCAGAGATATGTGGGTAATGGAGACGGGTCTGTTGTTGCCCCGGGCCACAGCTCAAGACGCTGGAAAGTATTAT
TGTCACCGTGGCAACCTGACCATGTCATTCCACCTGGAGATCACTGCTCGGCCAGTACTATGGCACTGGCTGCTGAGG
ACTGGTGGCTGGAAG
SEQID NO. 313
ATGCCACCTCCTCGCCTCCTCTTCTTCCTCCTCTTCCTCACCCCCATGGAAGTCAGGCCCGAGGAACCTCTAGTGGTG
AAGGTGGAAGAGGGAGATAACGCTGTGCTGCAGTGCCTCAAGGGGACCTCAGATGGCCCCACTCAGCAGCTGACCTGG
TCTCGGGAGTCCCCGCTTAAACCCTTCTTAAAACTCAGCCTGGGGCTGCCAGGCCTGGGAATCCACATGAGGCCCCTG
GCCATCTGGCTTTTCATCTTCAACGTCTCTCAACAGATGGGGGGCTTCTACCTGTGCCAGCCGGGGCCCCCCTCTGAG
AAGGCCTGGCAGCCTGGCTGGACAGTCAATGTGGAGGGCAGCGGGGAGCTGTTCCGGTGGAATGTTTCGGACCTAGGT
GGCCTGGGCTGTGGCCTGAAGAACAGGTCCTCAGAGGGCCCCAGCTCCCCTTCCGGGAAGCTCATGAGCCCCAAGCTG
TATGTGTGGGCCAAAGACCGCCCTGAGATCTGGGAGGGAGAGCCTCCGTGTCTCCCACCGAGGGACAGCCTGAACCAG
AGCCTCAGCCAGGACCTCACCATGGCCCCTGGCTCCACACTCTGGCTGTCCTGTGGGGTACCCCCTGACTCTGTGTCC
AGGGGCCCCCTCTCCTGGACCCATGTGCACCCCAAGGGGCCTAAGTCATTGCTGAGCCTAGAGCTGAAGGACGATCGC
CCGGCCAGAGATATGTGGGTAATGGAGACGGGTCTGTTGTTGCCCCGGGCCACAGCTCAAGACGCTGGAAAGTATTAT
TGTCACCGTGGCAACCTGACCATGTCATTCCACCTGGAGATCACTGCTCGGCCAGGGGGAGGTGGGTCTGGAGGTGGA
GGATCTGGTGGAGGTGGGTCTGGTGGAGGTGGGTCTGAGGTGCAGCTGGTGGAGTCTGGTGGTGGTCTTGTTCAACCT
GGTGGTTCTCTTCGTCTTTCTTGTGCTGCTTCTGGTTTTAATATTAAAGATACTTATATTCATTGGGTTCGTCAAGCT
CCTGGTAAAGGTCTTGAATGGGTTGCTCGTATTTATCCTACTAATGGTTATACTCGTTATGCTGATTCTGTTAAAGGT
CGTTTTACTATTTCTGCTGATACTTCTAAAAATACTGCTTATCTTCAAATGAACTCTCTTCGTGCTGAAGATACTGCT
GTTTATTATTGTTCTCGTTGGGGTGGTGATGGTTTTTATGCTATGGATTATTGGGGTCAAGGTACTCTTGTCACCGTC
TCCTCAGCTAGCACCGGGGGAGGTGGGTCTGGAGGTGGAGGATCTGGTGGAGGTGGGTCTGACATCCAGATGACCCAG
TCTCCTTCTTCTCTTTCTGCTTCTGTTGGTGATCGTGTTACTATTACTTGTCGTGCTTCTCAAGATGTTAATACTGCT
GTTGCTTGGTATCAACAAAAACCTGGTAAAGCTCCTAAACTTCTTATTTATTCTGCTTCTTTTCTTTATTCTGGTGTT
CCTTCTCGTTTTTCTGGTTCTCGTTCTGGTACTGATTTTACTCTTACTATTTCTTCTCTTCAACCTGAAGATTTTGCT
ACTTATTATTGTCAACAACATTATACTACTCCTCCTACTTTTGGTCAAGGTACCAAGGTGGAGATCAAACGTACGTCT
AGACATCATCACCATCACCAT
SEQID NO. 314
ATGCCACCTCCTCGCCTCCTCTTCTTCCTCCTCTTCCTCACCCCCATGGAAGTCAGGCCCGAGGAACCTCTAGTGGTG
AAGGTGGAAGAGGGAGATAACGCTGTGCTGCAGTGCCTCAAGGGGACCTCAGATGGCCCCACTCAGCAGCTGACCTGG
TCTCGGGAGTCCCCGCTTAAACCCTTCTTAAAACTCAGCCTGGGGCTGCCAGGCCTGGGAATCCACATGAGGCCCCTG
GCCATCTGGCTTTTCATCTTCAACGTCTCTCAACAGATGGGGGGCTTCTACCTGTGCCAGCCGGGGCCCCCCTCTGAG
AAGGCCTGGCAGCCTGGCTGGACAGTCAATGTGGAGGGCAGCGGGGAGCTGTTCCGGTGGAATGTTTCGGACCTAGGT
GGCCTGGGCTGTGGCCTGAAGAACAGGTCCTCAGAGGGCCCCAGCTCCCCTTCCGGGAAGCTCATGAGCCCCAAGCTG
TATGTGTGGGCCAAAGACCGCCCTGAGATCTGGGAGGGAGAGCCTCCGTGTCTCCCACCGAGGGACAGCCTGAACCAG
AGCCTCAGCCAGGACCTCACCATGGCCCCTGGCTCCACACTCTGGCTGTCCTGTGGGGTACCCCCTGACTCTGTGTCC
AGGGGCCCCCTCTCCTGGACCCATGTGCACCCCAAGGGGCCTAAGTCATTGCTGAGCCTAGAGCTGAAGGACGATCGC
CCGGCCAGAGATATGTGGGTAATGGAGACGGGTCTGTTGTTGCCCCGGGCCACAGCTCAAGACGCTGGAAAGTATTAT
TGTCACCGTGGCAACCTGACCATGTCATTCCACCTGGAGATCACTGCTCGGCCAGGAGGAGGTGGGTCTGGAGGTGGA
GGATCTGGTGGAGGTGGGTCTGGAGGAGGTGGGTCTCAGGTGCAGCTGGTGCAGAGCGGCGCCGAGGACAAGAAGCCC
GGCGAGAGCGTGAAGATCAGCTGCAAGGCCAGCGGCTACACCTTCACCAACTACGGCATGAACTGGGTGAGGCAGGCC
CCCGGCCAGGGCCTGAAGTGGATGGGCTGGATCAACACCTACACCGGCGAGAGCACCTACGCCGACGACTTCAAGGGC
AGGTTCGCCTTCAGCCTGGACACCAGCGCCAGCACCGCCTACCTGCAGCTGAGCAGCCTGAGGGGCGAGGACACCGCC
GTGTACTTCTGCGCCAGGTTCGCCATCAAGGGCGACTACTGGGGCCAGGGCACCACCGTGACCGTGAGCAGCGCCAGC
ACCGGCGGCGGCGGCAGCGGCGGCGGCGGCAGCGGCGGCGGCGGCAGCGGCGGCGGCGGCAGCGACATCGTGATGACC
CAGAGCCCCCTGAGCCTGGAGGTGAGCCCCGGCGAGCCCGCCAGCATCAGCTGCAGGAGCACCAAGAGCCTGCTGCAC
AGCGACGGCATCACCTACCTGTACTGGTACCTGCAGAAGCCCGGCCAGAGCCCCCAGCTGCTGATCTACCAGCTGAGC
AACCTGGCCAGCGGCGTGCCCGACAGGTTCAGCAGCAGCGGCAGCGGCACCGACTTCACCCTGAAGATCAGCAGGGTG
GAGGCCGAGGACGAGGGCACCTACTACTGCGCCCAGAACCTGGAGATCCCCAGGACCTTCGGCCAGGGCACCAAGCTG
GAGATCAAGAGGACCCATCATCACCATCACCAT
SEQID NO. 315
ATGCCACCTCCTCGCCTCCTCTTCTTCCTCCTCTTCCTCACCCCCATGGAAGTCAGGCCCGAGGAACCTCTAGTGGTG
AAGGTGGAAGAGGGAGATAACGCTGTGCTGCAGTGCCTCAAGGGGACCTCAGATGGCCCCACTCAGCAGCTGACCTGG
TCTCGGGAGTCCCCGCTTAAACCCTTCTTAAAACTCAGCCTGGGGCTGCCAGGCCTGGGAATCCACATGAGGCCCCTG
GCCATCTGGCTTTTCATCTTCAACGTCTCTCAACAGATGGGGGGCTTCTACCTGTGCCAGCCGGGGCCCCCCTCTGAG
AAGGCCTGGCAGCCTGGCTGGACAGTCAATGTGGAGGGCAGCGGGGAGCTGTTCCGGTGGAATGTTTCGGACCTAGGT
GGCCTGGGCTGTGGCCTGAAGAACAGGTCCTCAGAGGGCCCCAGCTCCCCTTCCGGGAAGCTCATGAGCCCCAAGCTG
TATGTGTGGGCCAAAGACCGCCCTGAGATCTGGGAGGGAGAGCCTCCGTGTCTCCCACCGAGGGACAGCCTGAACCAG
AGCCTCAGCCAGGACCTCACCATGGCCCCTGGCTCCACACTCTGGCTGTCCTGTGGGGTACCCCCTGACTCTGTGTCC
AGGGGCCCCCTCTCCTGGACCCATGTGCACCCCAAGGGGCCTAAGTCATTGCTGAGCCTAGAGCTGAAGGACGATCGC
CCGGCCAGAGATATGTGGGTAATGGAGACGGGTCTGTTGTTGCCCCGGGCCACAGCTCAAGACGCTGGAAAGTATTAT
TGTCACCGTGGCAACCTGACCATGTCATTCCACCTGGAGATCACTGCTCGGCCAGGAGGAGGTGGGTCTGGAGGTGGA
GGATCTGGTGGAGGTGGGTCTGGAGGAGGTGGGTCTCAGGTTCAGCTGGTGCAGTCTGGTGCTGAGGATGTGAAGCCT
GATGCCTCAGTGAAGCTCTCCTGCAAGGCTTCTGGTTACACATTCACTGACTACTACATGCACTGGGTGCGTCAGGCC
CCTGGTCAAGGTCTTGAGTGGATGGGTCGTGTTAATCCTAACCGGAGGGGTACTACCTACAACCAGAAATTCGAGGGC
CGTGTCACCATGACCACAGACACATCCACGAGCACAGCCTACATGCAGCTGAGTAGCCTGCGTGGTGAAGACACGGCC
GTGTATTACTGTGCGCGTGCGAACTGGCTTGACTACTGGGGCCAGGGCACCACCGTCACCGTCTCCTCCGCCTCCACC
GGGGGAGGTGGGTCTGGAGGTGGAGGATCTGGTGGAGGTGGGTCTGGTGGAGGTGGGTCTGACATCCAGATGACCCAG
TCTCCATCCTCCCTGGAGGCATCTGTAGGAGACAGAGTCACCATCACTTGCAGTGTCAGCTCAAGTGTATCCTCCATT
TACTTGCACTGGTATCAGCAGAAACCAGGGAAAAGCCCTAAGCTCCTGATCTATAGCACATCCAACTTGGCTTCTGGA
GTCCCAGATAGGTTCAGTGGCAGTGGATCTGGGACAGATTTCACTCTCACCATCAGCAGTCTGCAAGCCGAAGATGAG
GGCACTTACTACTGTCAAGTCTACAGTGGTTACCCGCTCACGTTCGGCGGAGGGACCAAGCTGGAGATCAAACGAACT
CATCATCACCATCACCAT
SEQID NO. 316
ATGCCACCTCCTCGCCTCCTCTTCTTCCTCCTCTTCCTCACCCCCATGGAAGTCAGGCCCGAGGAACCTCTAGTGGTG
AAGGTGGAAGAGGGAGATAACGCTGTGCTGCAGTGCCTCAAGGGGACCTCAGATGGCCCCACTCAGCAGCTGACCTGG
TCTCGGGAGTCCCCGCTTAAACCCTTCTTAAAACTCAGCCTGGGGCTGCCAGGCCTGGGAATCCACATGAGGCCCCTG
GCCATCTGGCTTTTCATCTTCAACGTCTCTCAACAGATGGGGGGCTTCTACCTGTGCCAGCCGGGGCCCCCCTCTGAG
AAGGCCTGGCAGCCTGGCTGGACAGTCAATGTGGAGGGCAGCGGGGAGCTGTTCCGGTGGAATGTTTCGGACCTAGGT
GGCCTGGGCTGTGGCCTGAAGAACAGGTCCTCAGAGGGCCCCAGCTCCCCTTCCGGGAAGCTCATGAGCCCCAAGCTG
TATGTGTGGGCCAAAGACCGCCCTGAGATCTGGGAGGGAGAGCCTCCGTGTCTCCCACCGAGGGACAGCCTGAACCAG
AGCCTCAGCCAGGACCTCACCATGGCCCCTGGCTCCACACTCTGGCTGTCCTGTGGGGTACCCCCTGACTCTGTGTCC
AGGGGCCCCCTCTCCTGGACCCATGTGCACCCCAAGGGGCCTAAGTCATTGCTGAGCCTAGAGCTGAAGGACGATCGC
CCGGCCAGAGATATGTGGGTAATGGAGACGGGTCTGTTGTTGCCCCGGGCCACAGCTCAAGACGCTGGAAAGTATTAT
TGTCACCGTGGCAACCTGACCATGTCATTCCACCTGGAGATCACTGCTCGGCCAGGAGGAGGTGGGTCTGGAGGTGGA
GGATCTGGTGGAGGTGGGTCTGGAGGAGGTGGGTCTCAGGTGCAGCTGCAGGAGAGCGGCCCCGGCGACGTGAAGCCC
AGCGAGACCCTGAGCCTGACCTGCACCGTGAGCGGCGGCAGCGTGAGCAGCGGCGACTACTACTGGACCTGGATCAGG
CAGAGCCCCGGCAAGGGCCTGGAGTGGATCGGCCACATCTACTACAGCGGCAACACCAACTACAACCCCAGCCTGAAG
AGCAGGCTGACCATCAGCATCGACACCAGCAAGACCACCTTCAGCCTGCAGCTGAGCAGCGTGACCGGCGAGGACACC
GCCATCTACTACTGCGTGAGGGACAGGGTGACCGGCGCCTTCGACATCTGGGGCCAGGGCACCACCGTGACCGTGAGC
AGCGCCAGCACCGGCGGCGGCGGCAGCGGCGGCGGCGGCAGCGGCGGCGGCGGCAGCGGCGGCGGCGGCAGCGACATC
CAGATGACCCAGAGCCCCAGCAGCCTGGAGGCCAGCGTGGGCGACAGGGTGACCATCACCTGCCAGGCCAGCCAGGAC
ATCAGCAACTACCTGAACTGGTACCAGCAGAAGCCCGGCAAGAGCCCCAAGCTGCTGATCTACGACGCCAGCAACCTG
GAGACCGGCGTGCCCGACAGGTTCAGCGGCAGCGGCAGCGGCACCGACTTCACCTTCACCATCAGCAGCCTGCAGGCC
GAGGACGAGGGCACCTACTTCTGCCAGCACTTCGACCACCTGCCCCTGGCCTTCGGCGGCGGCACCAAGCTGGAGATC
AAGAGGACCCATCATCACCATCACCAT
SEQID NO. 317
ATGCTCAGGCTGCTCTTGGCTCTCAACTTATTCCCTTCAATTCAAGTAACAGGAGACATCCAGATGACACAGACTACA
TCCTCCCTGTCTGCCTCTCTGGGAGACAGAGTCACCATCAGTTGCAGGGCAAGTCAGGACATTAGTAAATATTTAAAT
TGGTATCAGCAGAAACCAGATGGAACTGTTAAACTCCTGATCTACCATACATCAAGATTACACTCAGGAGTCCCATCA
AGGTTCAGTGGCAGTGGGTCTGGAACAGATTATTCTCTCACCATTAGCAACCTGGAGCAAGAAGATATTGCCACTTAC
TTTTGCCAACAGGGTAATACGCTTCCGTACACGTTCGGAGGGGGGACTAAGTTGGAAATAACAGGAGGAGGTGGGTCT
GGAGGTGGAGGATCTGGTGGAGGTGGGTCTGGAGGAGGTGGGTCTGAGGTGAAACTGCAGGAGTCAGGACCTGGCCTG
GTGGCGCCCTCACAGAGCCTGTCCGTCACATGCACTGTCTCAGGGGTCTCATTACCCGACTATGGTGTAAGCTGGATT
CGCCAGCCTCCACGAAAGGGTCTGGAGTGGCTGGGAGTAATATGGGGTAGTGAAACCACATACTATAATTCAGCTCTC
AAATCCAGACTGACCATCATCAAGGACAACTCCAAGAGCCAAGTTTTCTTAAAAATGAACAGTCTGCAAACTGATGAC
ACAGCCATTTACTACTGTGCCAAACATTATTACTACGGTGGTAGCTATGCTATGGACTACTGGGGTCAAGGAACCTCA
GTCACCGTCTCCTCAGACTACAAAGACGATGACGACAAGATTGAAGTTATGTATCCTCCTCCTTACCTAGACAATGAG
AAGAGCAATGGAACCATTATCCATGTGAAAGGGAAACACCTTTGTCCAAGTCCCCTATTTCCCGGACCTTCTAAGCCC
TTTTGGGTGCTGGTGGTGGTTGGTGGAGTCCTGGCTTGCTATAGCTTGCTAGTAACAGTGGCCTTTATTATTTTCTGG
GTGAGGAGTAAGAGGAGCAGGCTCCTGCACAGTGACTACATGAACATGACTCCCCGCCGCCCCGGGCCCACCCGCAAG
CATTACCAGCCCTATGCCCCACCACGCGACTTCGCAGCCTATCGCTCCAAACGGGGCAGAAAGAAACTCCTGTATATA
TTCAAACAACCATTTATGAGACCAGTACAAACTACTCAAGAGGAAGATGGCTGTAGCTGCCGATTTCCAGAAGAAGAA
GAAGGAGGATGTGAACTGAGAGTGAAGTTCAGCAGGAGCGCAGACGCCCCCGCGTACCAGCAGGGCCAGAACCAGCTC
TATAACGAGCTCAATCTAGGACGAAGAGAGGAGTACGATGTTTTGGACAAGAGACGTGGCCGGGACCCTGAGATGGGG
GGAAAGCCGCAGAGAAGGAAGAACCCTCAGGAAGGCCTGTACAATGAACTGCAGAAAGATAAGATGGCGGAGGCCTAC
AGTGAGATTGGGATGAAAGGCGAGCGCCGGAGGGGCAAGGGGCACGATGGCCTTTACCAGGGTCTCAGTACAGCCACC
AAGGACACCTACGACGCCCTTCACATGCAGGCCCTGCCCCCTCGC
SEQID NO. 318
ATGCTCAGGCTGCTCTTGGCTCTCAACTTATTCCCTTCAATTCAAGTAACAGGAGACATCCAGATGACACAGACTACA
TCCTCCCTGTCTGCCTCTCTGGGAGACAGAGTCACCATCAGTTGCAGGGCAAGTCAGGACATTAGTAAATATTTAAAT
TGGTATCAGCAGAAACCAGATGGAACTGTTAAACTCCTGATCTACCATACATCAAGATTACACTCAGGAGTCCCATCA
AGGTTCAGTGGCAGTGGGTCTGGAACAGATTATTCTCTCACCATTAGCAACCTGGAGCAAGAAGATATTGCCACTTAC
TTTTGCCAACAGGGTAATACGCTTCCGTACACGTTCGGAGGGGGGACTAAGTTGGAAATAACAGGAGGAGGTGGGTCT
GGAGGTGGAGGATCTGGTGGAGGTGGGTCTGGAGGAGGTGGGTCTGAGGTGAAACTGCAGGAGTCAGGACCTGGCCTG
GTGGCGCCCTCACAGAGCCTGTCCGTCACATGCACTGTCTCAGGGGTCTCATTACCCGACTATGGTGTAAGCTGGATT
CGCCAGCCTCCACGAAAGGGTCTGGAGTGGCTGGGAGTAATATGGGGTAGTGAAACCACATACTATAATTCAGCTCTC
AAATCCAGACTGACCATCATCAAGGACAACTCCAAGAGCCAAGTTTTCTTAAAAATGAACAGTCTGCAAACTGATGAC
ACAGCCATTTACTACTGTGCCAAACATTATTACTACGGTGGTAGCTATGCTATGGACTACTGGGGTCAAGGAACCTCA
GTCACCGTCTCCTCAATTGAAGTTATGTATCCTCCTCCTTACCTAGACAATGAGAAGAGCAATGGAACCATTATCCAT
GTGAAAGGGAAACACCTTTGTCCAAGTCCCCTATTTCCCGGACCTTCTAAGCCCTTTTGGGTGCTGGTGGTGGTTGGT
GGAGTCCTGGCTTGCTATAGCTTGCTAGTAACAGTGGCCTTTATTATTTTCTGGGTGAGGAGTAAGAGGAGCAGGCTC
CTGCACAGTGACTACATGAACATGACTCCCCGCCGCCCCGGGCCCACCCGCAAGCATTACCAGCCCTATGCCCCACCA
CGCGACTTCGCAGCCTATCGCTCCAAACGGGGCAGAAAGAAACTCCTGTATATATTCAAACAACCATTTATGAGACCA
GTACAAACTACTCAAGAGGAAGATGGCTGTAGCTGCCGATTTCCAGAAGAAGAAGAAGGAGGATGTGAACTGAGAGTG
AAGTTCAGCAGGAGCGCAGACGCCCCCGCGTACCAGCAGGGCCAGAACCAGCTCTATAACGAGCTCAATCTAGGACGA
AGAGAGGAGTACGATGTTTTGGACAAGAGACGTGGCCGGGACCCTGAGATGGGGGGAAAGCCGCAGAGAAGGAAGAAC
CCTCAGGAAGGCCTGTACAATGAACTGCAGAAAGATAAGATGGCGGAGGCCTACAGTGAGATTGGGATGAAAGGCGAG
CGCCGGAGGGGCAAGGGGCACGATGGCCTTTACCAGGGTCTCAGTACAGCCACCAAGGACACCTACGACGCCCTTCAC
ATGCAGGCCCTGCCCCCTCGC
SEQID NO. 319
ATGGAGAAGGACACCCTGCTGCTGTGGGTGCTGCTGCTGTGGGTGCCCGGCAGCACCGGCGAGGTGAAGCTGGTGGAG
AGCGGCGGCGGCCTGGTGCAGCCCGGCGGCAGCCTGAAGCTGAGCTGCGCCGCCAGCGGCTTCGACTTCAGCAGGTAC
TGGATGAGCTGGGTGAGGCAGGCCCCCGGCAAGGGCCTGGAGTGGATCGGCGAGATCAACCTGGACAGCAGCACCATC
AACTACACCCCCAGCCTGAAGGACAAGTTCATCATCAGCAGGGACAACGCCAAGAACACCCTGTACCTGCAGATGAGC
AAGGTGAGGAGCGAGGACACCGCCCTGTACTACTGCGCCAGGAGGTACGACGCCATGGACTACTGGGGCCAGGGCACC
AGCGTGACCGTGAGCAGCGCCAAGACCACCGCCCCCAGCGTGTACCCCCTGGCCCCCGTGTGCGGCGACACCACCGGC
AGCAGCGTGACCCTGGGCTGCCTGGTGAAGGGCTACTTCCCCGAGCCCGTGACCCTGACCTGGAACAGCGGCAGCCTG
AGCAGCGGCGTGCACACCTTCCCCGCCGTGCTGCAGAGCGACCTGTACACCCTGAGCAGCAGCGTGACCGTGACCAGC
AGCACCTGGCCCAGCCAGAGCATCACCTGCAACGTGGCCCACCCCGCCAGCAGCACCAAGGTGGACAAGAAGATCGAG
CCCAGGGGCCCCACCATCAAGCCCTGCCCCCCCTGCAAGTGCCCCGCCCCCAACCTGCTGGGCGGCCCCAGCGTGTTC
ATCTTCCCCCCCAAGATCAAGGACGTGCTGATGATCAGCCTGAGCCCCATCGTGACCTGCGTGGTGGTGGACGTGAGC
GAGGACGACCCCGACGTGCAGATCAGCTGGTTCGTGAACAACGTGGAGGTGCACACCGCCCAGACCCAGACCCACAGG
GAGGACTACAACAGCACCCTGAGGGTGGTGAGCGCCCTGCCCATCCAGCACCAGGACTGGATGAGCGGCAAGGAGTTC
AAGTGCAAGGTGAACAACAAGGACCTGCCCGCCCCCATCGAGAGGACCATCAGCAAGCCCAAGGGCAGCGTGAGGGCC
CCCCAGGTGTACGTGCTGCCCCCCCCCGAGGAGGAGATGACCAAGAAGCAGGTGACCCTGACCTGCATGGTGACCGAC
TTCATGCCCGAGGACATCTACGTGGAGTGGACCAACAACGGCAAGACCGAGCTGAACTACAAGAACACCGAGCCCGTG
CTGGACAGCGACGGCAGCTACTTCATGTACAGCAAGCTGAGGGTGGAGAAGAAGAACTGGGTGGAGAGGAACAGCTAC
AGCTGCAGCGTGGTGCACGAGGGCCTGCACAACCACCACACCACCAAGAGCTTCAGCAGGACCCCCGGCAAG
SEQID NO. 320
ATGGACTTCGGCCTGATCTTCTTCATCGTGGCCCTGCTGAAGGGCGTGCAGTGCGACATCGTGCTGACCCAGAGCCCC
GCCAGCCTGGCCGTGAGCCTGGGCCAGAGGGCCACCATCAGCTGCAGGGCCAGCGAGAGCGTGGACGACTACGGCATC
AGCTTCATGAACTGGTTCCAGCAGAAGCCCGGCCAGCCCCCCAAGCTGCTGATCTACGCCGCCCCCAACCAGGGCAGC
GGCGTGCCCGCCAGGTTCAGCGGCAGCGGCAGCGGCACCGACTTCAGCCTGAACATCCACCCCATGGAGGAGGACGAC
ACCGCCATGTACTTCTGCCAGCAGAGCAAGGACGTGAGGTGGACCTTCGGCGGCGGCACCAAGCTGGAGATCAAGAGG
GCCGACGCCGCCCCCACCGTGAGCATCTTCCCCCCCAGCAGCGAGCAGCTGACCAGCGGCGGCGCCAGCGTGGTGTGC
TTCCTGAACAACTTCTACCCCAAGGACATCAACGTGAAGTGGAAGATCGACGGCAGCGAGAGGCAGAACGGCGTGCTG
AACAGCTGGACCGACCAGGACAGCAAGGACAGCACCTACAGCATGAGCAGCACCCTGACCCTGACCAAGGACGAGTAC
GAGAGGCACAACAGCTACACCTGCGAGGCCACCCACAAGACCAGCACCAGCCCCATCGTGAAGAGCTTCAACAGGAAC
GAGTGC
SEQID NO. 321
ATGGAGAAGGACACCCTGCTGCTGTGGGTGCTGCTGCTGTGGGTGCCCGGCAGCACCGGCGAGGTGAAGCTGGTGGAG
AGCGGCGGCGGCCTGGTGCAGCCCGGCGGCAGCCTGAAGCTGAGCTGCGCCGCCAGCGGCTTCGACTTCAGCAGGTAC
TGGATGAGCTGGGTGAGGCAGGCCCCCGGCAAGGGCCTGGAGTGGATCGGCGAGATCAACCTGGACAGCAGCACCATC
AACTACACCCCCAGCCTGAAGGACAAGTTCATCATCAGCAGGGACAACGCCAAGAACACCCTGTACCTGCAGATGAGC
AAGGTGAGGAGCGAGGACACCGCCCTGTACTACTGCGCCAGGAGGTACGACGCCATGGACTACTGGGGCCAGGGCACC
AGCGTGACCGTGAGCAGCGCCAGCACCGGCGGCGGCGGCAGCGGCGGCGGCGGCAGCGGCGGCGGCGGCAGCGGCGGC
GGCGGCAGCGACATCGTGCTGACCCAGAGCCCCGCCAGCCTGGCCGTGAGCCAGGGCCAGAGGGCCACCATCAGCTGC
AGGGCCAGCGAGAGCGTGGACGACTACGGCATCAGCTTCATGAACTGGTTCCAGCAGAAGCCCGGCCAGCCCCCCAAG
CTGCTGATCTACGCCGCCCCCAACCAGGGCAGCGGCGTGCCCGCCAGGTTCAGCGGCAGCGGCAGCGGCACCGACTTC
AGCCTGAACATCCACCCCATGGAGGAGGACGACACCGCCACCTACTTCTGCCAGCAGAGCAAGGACGTGAGGTGGACC
TTCGGCGGCGGCACCAAGCTGGAGATCAAGAGGGGAGGAGGTGGGTCTGGAGGTGGAGGATCTGGTGGAGGTGGGTCT
GGAGGAGGTGGGTCTGAGGTGCAGCTGGTGGAGTCTGGTGGTGGTCTTGTTCAACCTGGTGGTTCTCTTCGTCTTTCT
TGTGCTGCTTCTGGTTTTAATATTAAAGATACTTATATTCATTGGGTTCGTCAAGCTCCTGGTAAAGGTCTTGAATGG
GTTGCTCGTATTTATCCTACTAATGGTTATACTCGTTATGCTGATTCTGTTAAAGGTCGTTTTACTATTTCTGCTGAT
ACTTCTAAAAATACTGCTTATCTTCAAATGAACTCTCTTCGTGCTGAAGATACTGCTGTTTATTATTGTTCTCGTTGG
GGTGGTGATGGTTTTTATGCTATGGATTATTGGGGTCAAGGTACTCTTGTCACCGTCTCCTCAGCTAGCACCGGGGGA
GGTGGGTCTGGAGGTGGAGGATCTGGTGGAGGTGGGTCTGACATCCAGATGACCCAGTCTCCTTCTTCTCTTTCTGCT
TCTGTTGGTGATCGTGTT ACTATTACTTGTCGTGCTTCTCAAGATGTTAATACTGCTGT
TGCTTGGTATCAACAAAAACCTGGTAAAGCTCCTAAACTTCTTATTTATTCTGCTTCTTTTCTTTATTCTGGTGTTCC
TTCTCGTTTTTCTGGTTCTCGTTCTGGTACTGATTTTACTCTTACTATTTCTTCTCTTCAACCTGAAGATTTTGCTAC
TTATTATTGTCAACAACATTATACTACTCCTCCTACTTTTGGTCAAGGTACCAAGGTGGAGATCAAACGTACGTCTAG
AGGGCCCCATCATCACCATCACCAT
SEQID NO. 322
ATGGACTTCGGCCTGATCTTCTTCATCGTGGCCCTGCTGAAGGGCGTGCAGTGCGACATCGTGCTGACCCAGAGCCCC
GCCAGCCTGGCCGTGAGCCAGGGCCAGAGGGCCACCATCAGCTGCAGGGCCAGCGAGAGCGTGGACGACTACGGCATC
AGCTTCATGAACTGGTTCCAGCAGAAGCCCGGCCAGCCCCCCAAGCTGCTGATCTACGCCGCCCCCAACCAGGGCAGC
GGCGTGCCCGCCAGGTTCAGCGGCAGCGGCAGCGGCACCGACTTCAGCCTGAACATCCACCCCATGGAGGAGGACGAC
ACCGCCACCTACTTCTGCCAGCAGAGCAAGGACGTGAGGTGGACCTTCGGCGGCGGCACCAAGCTGGAGATCAAGAGG
GGCGGCGGCGGCAGCGGCGGCGGCGGCAGCGGCGGCGGCGGCAGCGGCGGCGGCGGCAGCGAGGTGAAGCTGGTGGAG
AGCGGCGGCGGCCTGGTGCAGCCCGGCGGCAGCCTGAAGCTGAGCTGCGCCGCCAGCGGCTTCGACTTCAGCAGGTAC
TGGATGAGCTGGGTGAGGCAGGCCCCCGGCAAGGGCCTGGAGTGGATCGGCGAGATCAACCTGGACAGCAGCACCATC
AACTACACCCCCAGCCTGAAGGACAAGTTCATCATCAGCAGGGACAACGCCAAGAACACCCTGTACCTGCAGATGAGC
AAGGTGAGGAGCGAGGACACCGCCCTGTACTACTGCGCCAGGAGGTACGACGCCATGGACTACTGGGGCCAGGGCACC
AGCGTGACCGTGAGCAGCGGAGGAGGTGGGTCTGGAGGTGGAGGATCTGGTGGAGGTGGGTCTGGAGGAGGTGGGTCT
GAGGTGCAGCTGGTGGAGTCTGGTGGTGGTCTTGTTCAACCTGGTGGTTCTCTTCGTCTTTCTTGTGCTGCTTCTGGT
TTTAATATTAAAGATACTTATATTCATTGGGTTCGTCAAGCTCCTGGTAAAGGTCTTGAATGGGTTGCTCGTATTTAT
CCTACTAATGGTTATACTCGTTATGCTGATTCTGTTAAAGGTCGTTTTACTATTTCTGCTGATACTTCTAAAAATACT
GCTTATCTTCAAATGAACTCTCTTCGTGCTGAAGATACTGCTGTTTATTATTGTTCTCGTTGGGGTGGTGATGGTTTT
TATGCTATGGATTATTGGGGTCAAGGTACTCTTGTCACCGTCTCCTCAGCTAGCACCGGGGGAGGTGGGTCTGGAGGT
GGAGGATCTGGTGGAGGTGGGTCTGACATCCAGATGACCCAGTCTCCTTCTTCTCTTTCTGCTTCTGTTGGTGATCGT
GTTACTATTACTTGTCGTGCTTCTCAAGATGTTAATACTGCTGTTGCTTGGTATCAACAAAAACCTGGTAAAGCTCCT
AAACTTCTTATTTATTCTGCTTCTTTTCTTTATTCTGGTGTTCCTTCTCGTTTTTCTGGTTCTCGTTCTGGTACTGAT
TTTACTCTTACTATTTCTTCTCTTCAACCTGAAGATTTTGCTACTTATTATTGTCAACAACATTATACTACTCCTCCT
ACTTTTGGTCAAGGTACCAAGGTGGAGATCAAACGTACGTCTAGAGGGCCCCATCATCACCATCACCAT

The application's sequence listing, which the Patent Office published only in electronic form, follows.

SEQUENCE LISTING (323 sequences)

SEQ ID NO: 1 - protein, 463 aa, Artificial Sequence
  Description of Artificial Sequence: Synthetic polypeptide
MEFGLSWVFLVALFRGVQCQVQLQESGPGLVKPSETLSLTCTVSGGSVSSGDYYWTWIRQSPGKGLEWIGHIYYSGNTNYNPSLKSRLTISIDTSKTQFSLKLSSVTAADTAIYYCVRDRVTGAFDIWGQGTMVTVSSASTKGPSVFPLAPCSRSTSESTAALGCLVKDYFPEPVTVSWNSGALTSGVHTFPAVLQSSGLYSLSSVVTVPSSNFGTQTYTCNVDHKPSNTKVDKTVERKCCVECPPCPAPPVAGPSVFLFPPKPKDTLMISRTPEVTCVVVDVSHEDPEVQFNWYVDGVEVHNAKTKPREEQFQSTFRVVSVLTVVHQDWLNGKEYKCKVSNKGLPAPIEKTISKTKGQPREPQVYTLPPSREEMTKNQVSLTCLVKGFYPSDIAVEWESNGQPENNYKTTPPMLDSDGSFFLYSKLTVDKSRWQQGNVFSCSVMHEALHNHYTQKSLSLSPG

SEQ ID NO: 2 - protein, 347 aa, Artificial Sequence
  Description of Artificial Sequence: Synthetic polypeptide
MPPPRLLFFLLFLTPMEVRPEEPLVVKVEEGDNAVLQCLKGTSDGPTQQLTWSRESPLKPFLKLSLGLPGLGIHMRPLAIWLFIFNVSQQMGGFYLCQPGPPSEKAWQPGWTVNVEGSGGGGSGGGGSGGGGSDIQMTQSPSSLSASVGDRVTITCQASQDISNYLNWYQQKPGKAPKLLIYDASNLETGVPSRFSGSGSGTDFTFTISSLQPEDIATYFCQHFDHLPLAFGGGTKVEIKRTVAAPSVFIFPPSDEQLKSGTASVVCLLNNFYPREAKVQWKVDNALQSGNSQESVTEQDSKDSTYSLSSTLTLSKADYEKHKVYACEVTHQGLSSPVTKSFNRGEC

SEQ ID NO: 3 - protein, 577 aa, Artificial Sequence
  Description of Artificial Sequence: Synthetic polypeptide
MPPPRLLFFLLFLTPMEVRPEEPLVVKVEEGDNAVLQCLKGTSDGPTQQLTWSRESPLKPFLKLSLGLPGLGIHMRPLAIWLFIFNVSQQMGGFYLCQPGPPSEKAWQPGWTVNVEGSGGGGSGGGGSGGGGSQVQLQESGPGLVKPSETLSLTCTVSGGSVSSGDYYWTWIRQSPGKGLEWIGHIYYSGNTNYNPSLKSRLTISIDTSKTQFSLKLSSVTAADTAIYYCVRDRVTGAFDIWGQGTMVTVSSASTKGPSVFPLAPCSRSTSESTAALGCLVKDYFPEPVTVSWNSGALTSGVHTFPAVLQSSGLYSLSSVVTVPSSNFGTQTYTCNVDHKPSNTKVDKTVERKCCVECPPCPAPPVAGPSVFLFPPKPKDTLMISRTPEVTCVVVDVSHEDPEVQFNWYVDGVEVHNAKTKPREEQFQSTFRVVSVLTVVHQDWLNGKEYKCKVSNKGLPAPIEKTISKTKGQPREPQVYTLPPSREEMTKNQVSLTCLVKGFYPSDIAVEWESNGQPENNYKTTPPMLDSDGSFFLYSKLTVDKSRWQQGNVFSCSVMHEALHNHYTQKSLSLSPG

SEQ ID NO: 4 - protein, 234 aa, Artificial Sequence
  Description of Artificial Sequence: Synthetic polypeptide
METDTLLLWVLLLWVPGSTGDIQMTQSPSSLSASVGDRVTITCQASQDISNYLNWYQQKPGKAPKLLIYDASNLETGVPSRFSGSGSGTDFTFTISSLQPEDIATYFCQHFDHLPLAFGGGTKVEIKRTVAAPSVFIFPPSDEQLKSGTASVVCLLNNFYPREAKVQWKVDNALQSGNSQESVTEQDSKDSTYSLSSTLTLSKADYEKHKVYACEVTHQGLSSPVTKSFNRGEC

SEQ ID NO: 5 - protein, 356 aa, Artificial Sequence
  Description of Artificial Sequence: Synthetic polypeptide
METDTLLLWVLLLWVPGSTGDIQMTQSPSSLSASVGDRVTITCQASQDISNYLNWYQQKPGKAPKLLIYDASNLETGVPSRFSGSGSGTDFTFTISSLQPEDIATYFCQHFDHLPLAFGGGTKVEIKRTVAAPSVFIFPPSDEQLKSGTASVVCLLNNFYPREAKVQWKVDNALQSGNSQESVTEQDSKDSTYSLSSTLTLSKADYEKHKVYACEVTHQGLSSPVTKSFNRGECDKTHTSPPSPAPEAAGGPSEVRPEEPLVVKVEEGDNAVLQCLKGTSDGPTQQLTWSRESPLKPFLKLSLGLPGLGIHMRPLAIWLFIFNVSQQMGGFYLCQPGPPSEKAWQPGWTVNVEGSG

SEQ ID NO: 6 - protein, 581 aa, Artificial Sequence
  Description of Artificial Sequence: Synthetic polypeptide
MEFGLSWVFLVALFRGVQCQVQLQESGPGLVKPSETLSLTCTVSGGSVSSGDYYWTWIRQSPGKGLEWIGHIYYSGNTNYNPSLKSRLTISIDTSKTQFSLKLSSVTAADTAIYYCVRDRVTGAFDIWGQGTMVTVSSASTKGPSVFPLAPCSRSTSESTAALGCLVKDYFPEPVTVSWNSGALTSGVHTFPAVLQSSGLYSLSSVVTVPSSNFGTQTYTCNVDHKPSNTKVDKTVERKCCVECPPCPAPPVAGPSVFLFPPKPKDTLMISRTPEVTCVVVDVSHEDPEVQFNWYVDGVEVHNAKTKPREEQFQSTFRVVSVLTVVHQDWLNGKEYKCKVSNKGLPAPIEKTISKTKGQPREPQVYTLPPSREEMTKNQVSLTCLVKGFYPSDIAVEWESNGQPENNYKTTPPMLDSDGSFFLYSKLTVDKSRWQQGNVFSCSVMHEALHNHYTQKSLSLSPGGGGGSGGGGSGGGGSEVRPEEPLVVKVEEGDNAVLQCLKGTSDGPTQQLTWSRESPLKPFLKLSLGLPGLGIHMRPLAIWLFIFNVSQQMGGFYLCQPGPPSEKAWQPGWTVNVEGSG

SEQ ID NO: 7 - protein, 460 aa, Artificial Sequence
  Description of Artificial Sequence: Synthetic polypeptide
MEFGLSWVFLVALFRGVQCQVQLVQSGAEVKKPGASVKVSCKASGYTFTDYYMHWVRQAPGQGLEWMGRVNPNRRGTTYNQKFEGRVTMTTDTSTSTAYMELRSLRSDDTAVYYCARANWLDYWGQGTTVTVSSASTKGPSVFPLAPCSRSTSESTAALGCLVKDYFPEPVTVSWNSGALTSGVHTFPAVLQSSGLYSLSSVVTVPSSSLGTKTYTCNVDHKPSNTKVDKRVESKYGPPCPPCPAPEAAGGPSVFLFPPKPKDTLMISRTPEVTCVVVDVSQEDPEVQFNWYVDGVEVHNAKTKPREEQFNSTYRVVSVLTVLHQDWLNGKEYKCKVSNKGLPSSIEKTISKAKGQPREPQVYTLPPSQEEMTKNQVSLTCLVKGFYPSDIAVEWESNGQPENNYKTTPPVLDSDGSFFLYSRLTVDKSRWQEGNVFSCSVMHEALHNHYTQKSLSLSLG

SEQ ID NO: 8 - protein, 348 aa, Artificial Sequence
  Description of Artificial Sequence: Synthetic polypeptide
MPPPRLLFFLLFLTPMEVRPEEPLVVKVEEGDNAVLQCLKGTSDGPTQQLTWSRESPLKPFLKLSLGLPGLGIHMRPLAIWLFIFNVSQQMGGFYLCQPGPPSEKAWQPGWTVNVEGSGGGGSGGGGSGGGGSDIQMTQSPSSLSASVGDRVTITCSVSSSVSSIYLHWYQQKPGKAPKLLIYSTSNLASGVPSRFSGSGSGTDFTLTISSLQPEDFATYYCQVYSGYPLTFGGGTKVEIKRTVAAPSVFIFPPSDEQLKSGTASVVCLLNNFYPREAKVQWKVDNALQSGNSQESVTEQDSKDSTYSLSSTLTLSKADYEKHKVYACEVTHQGLSSPVTKSFNRGEC

SEQ ID NO: 9 - protein, 573 aa, Artificial Sequence
  Description of Artificial Sequence: Synthetic polypeptide
MPPPRLLFFLLFLTPMEVRPEEPLVVKVEEGDNAVLQCLKGTSDGPTQQLTWSRESPLKPFLKLSLGLPGLGIHMRPLAIWLFIFNVSQQMGGFYLCQPGPPSEKAWQPGWTVNVEGSGGGGSGGGGSGGGGSQVQLVQSGAEVKKPGASVKVSCKASGYTFTDYYMHWVRQAPGQGLEWMGRVNPNRRGTTYNQKFEGRVTMTTDTSTSTAYMELRSLRSDDTAVYYCARANWLDYWGQGTTVTVSSASTKGPSVFPLAPCSRSTSESTAALGCLVKDYFPEPVTVSWNSGALTSGVHTFPAVLQSSGLYSLSSVVTVPSSSLGTKTYTCNVDHKPSNTKVDKRVESKYGPPCPPCPAPEAAGGPSVFLFPPKPKDTLMISRTPEVTCVVVDVSQEDPEVQFNWYVDGVEVHNAKTKPREEQFNSTYRVVSVLTVLHQDWLNGKEYKCKVSNKGLPSSIEKTISKAKGQPREPQVYTLPPSQEEMTKNQVSLTCLVKGFYPSDIAVEWESNGQPENNYKTTPPVLDSDGSFFLYSRLTVDKSRWQEGNVFSCSVMHEALHNHYTQKSLSLSL

SEQ ID NO: 10 - protein, 235 aa, Artificial Sequence
  Description of Artificial Sequence: Synthetic polypeptide
METDTLLLWVLLLWVPGSTGDIQMTQSPSSLSASVGDRVTITCSVSSSVSSIYLHWYQQKPGKAPKLLIYSTSNLASGVPSRFSGSGSGTDFTLTISSLQPEDFATYYCQVYSGYPLTFGGGTKVEIKRTVAAPSVFIFPPSDEQLKSGTASVVCLLNNFYPREAKVQWKVDNALQSGNSQESVTEQDSKDSTYSLSSTLTLSKADYEKHKVYACEVTHQGLSSPVTKSFNRGEC

SEQ ID NO: 11 - protein, 357 aa, Artificial Sequence
  Description of Artificial Sequence: Synthetic polypeptide
METDTLLLWVLLLWVPGSTGDIQMTQSPSSLSASVGDRVTITCSVSSSVSSIYLHWYQQKPGKAPKLLIYSTSNLASGVPSRFSGSGSGTDFTLTISSLQPEDFATYYCQVYSGYPLTFGGGTKVEIKRTVAAPSVFIFPPSDEQLKSGTASVVCLLNNFYPREAKVQWKVDNALQSGNSQESVTEQDSKDSTYSLSSTLTLSKADYEKHKVYACEVTHQGLSSPVTKSFNRGECDKTHTSPPSPAPEAAGGPSEVRPEEPLVVKVEEGDNAVLQCLKGTSDGPTQQLTWSRESPLKPFLKLSLGLPGLGIHMRPLAIWLFIFNVSQQMGGFYLCQPGPPSEKAWQPGWTVNVEGSG

SEQ ID NO: 12 - protein, 578 aa, Artificial Sequence
  Description of Artificial Sequence: Synthetic polypeptide
MEFGLSWVFLVALFRGVQCQVQLVQSGAEVKKPGASVKVSCKASGYTFTDYYMHWVRQAPGQGLEWMGRVNPNRRGTTYNQKFEGRVTMTTDTSTSTAYMELRSLRSDDTAVYYCARANWLDYWGQGTTVTVSSASTKGPSVFPLAPCSRSTSESTAALGCLVKDYFPEPVTVSWNSGALTSGVHTFPAVLQSSGLYSLSSVVTVPSSSLGTKTYTCNVDHKPSNTKVDKRVESKYGPPCPPCPAPEAAGGPSVFLFPPKPKDTLMISRTPEVTCVVVDVSQEDPEVQFNWYVDGVEVHNAKTKPREEQFNSTYRVVSVLTVLHQDWLNGKEYKCKVSNKGLPSSIEKTISKAKGQPREPQVYTLPPSQEEMTKNQVSLTCLVKGFYPSDIAVEWESNGQPENNYKTTPPVLDSDGSFFLYSRLTVDKSRWQEGNVFSCSVMHEALHNHYTQKSLSLSLGGGGGSGGGGSGGGGSEVRPEEPLVVKVEEGDNAVLQCLKGTSDGPTQQLTWSRESPLKPFLKLSLGLPGLGIHMRPLAIWLFIFNVSQQMGGFYLCQPGPPSEKAWQPGWTVNVEGSG

SEQ ID NO: 13 - protein, 646 aa, Artificial Sequence
  Description of Artificial Sequence: Synthetic polypeptide
METDTLLLWVLLLWVPGSTGDIQMTQTTSSLSASLGDRVTISCRASQDISKYLNWYQQKPDGTVKLLIYHTSRLHSGVPSRFSGSGSGTDYSLTISNLEQEDIATYFCQQGNTLPYTFGGGTKLEITGGGGSGGGGSGGGGSGGGGSEVKLQESGPGLVAPSQSLSVTCTVSGVSLPDYGVSWIRQPPRKGLEWLGVIWGSETTYYNSALKSRLTIIKDNSKSQVFLKMNSLQTDDTAIYYCAKHYYYGGSYAMDYWGQGTSVTVSSPSQFRVSPLDRTWNLGETVELKCQVLLSNPTSGCSWLFQPRGAAASPTFLLYLSQNKPKAAEGLDTQRFSGKRLGDTFVLTLSDFRRENEGYYFCSALSNSIMYFSHFVPVFLPAKPTTTPAPRPPTPAPTIASQPLSLRPEACRPAAGGAVHTRGLDFACDIYIWAPLAGTCGVLLLSLVITRSKRSRLLHSDYMNMTPRRPGPTRKHYQPYAPPRDFAAYRSKRGRKKLLYIFKQPFMRPVQTTQEEDGCSCRFPEEEEGGCELRVKFSRSADAPAYQQGQNQLYNELNLGRREEYDVLDKRRGRDPEMGGKPQRRKNPQEGLYNELQKDKMAEAYSEIGMKGERRRGKGHDGLYQGLSTATKDTYDALHMQALPPR

SEQ ID NO: 14 - protein, 125 aa, Artificial Sequence
  Description of Artificial Sequence: Synthetic polypeptide
MPPPRLLFFLLFLTPMEVRPEEPLVVKVEEGDNAVLQCLKGTSDGPTQQLTWSRESPLKPFLKLSLGLPGLGIHMRPLAIWLFIFNVSQQMGGFYLCQPGPPSEKAWQPGWTVNVEGSGHHHHHH

SEQ ID NO: 15 - protein, 345 aa, Artificial Sequence
  Description of Artificial Sequence: Synthetic polypeptide
MPPPRLLFFLLFLTPMEVRPEEPLVVKVEEGDNAVLQCLKGTSDGPTQQLTWSRESPLKPFLKLSLGLPGLGIHMRPLAIWLFIFNVSQQMGGFYLCQPGPPSEKAWQPGWTVNVEGSGDKTHTCPPCPAPELLGGPSVFLFPPKPKDTLMISRTPEVTCVVVDVSHEDPEVKFNWYVDGVEVHNAKTKPREEQYNSTYRVVSVLTVLHQDWLNGKEYKCKVSNKALPAPIEKTISKAKGQPREPQVYTLPPSREEMTKNQVSLTCLVKGFYPSDIAVEWESNGQPENNYKTTPPVLDSDGSFFLYSKLTVDKSRWQQGNVFSCSVMHEALHNHYTQKSLSLSPG

SEQ ID NO: 16 - protein, 274 aa, Artificial Sequence
  Description of Artificial Sequence: Synthetic polypeptide
MEFGLSWVFLVALFRGVQCEVQLVESGGGLVQPGGSLRLSCAASGFNIKDTYIHWVRQAPGKGLEWVARIYPTNGYTRYADSVKGRFTISADTSKNTAYLQMNSLRAEDTAVYYCSRWGGDGFYAMDYWGQGTLVTVSSASTGGGGSGGGGSGGGGSDIQMTQSPSSLSASVGDRVTITCRASQDVNTAVAWYQQKPGKAPKLLIYSASFLYSGVPSRFSGSRSGTDFTLTISSLQPEDFATYYCQQHYTTPPTFGQGTKVEIKRTGPHHHHHH

SEQ ID NO: 17 - protein, 280 aa, Artificial Sequence
  Description of Artificial Sequence: Synthetic polypeptide
MEFGLSWVFLVALFRGVQCQVQLVQSGAEDKKPGESVKISCKASGYTFTNYGMNWVRQAPGQGLKWMGWINTYTGESTYADDFKGRFAFSLDTSASTAYLQLSSLRGEDTAVYFCARFAIKGDYWGQGTTVTVSSASTGGGGSGGGGSGGGGSGGGGSDIVMTQSPLSLEVSPGEPASISCRSTKSLLHSDGITYLYWYLQKPGQSPQLLIYQLSNLASGVPDRFSSSGSGTDFTLKISRVEAEDEGTYYCAQNLEIPRTFGQGTKLEIKRTGPHHHHHH

SEQ ID NO: 18 - protein, 278 aa, Artificial Sequence
  Description of Artificial Sequence: Synthetic polypeptide
METDTLLLWVLLLWVPGSTGDIVMTQSPLSLPVTPGEPASISCRSTKSLLHSDGITYLYWYLQKPGQSPQLLIYQLSNLASGVPDRFSSSGSGTDFTLKISRVEAEDEGVYYCAQNLEIPRTFGCGTKLEIKRTGGGGSGGGGSGGGGSGGGGSQVQLVQSGAEVKKPGESVKISCKASGYTFTNYGMNWVRQAPGQCLKWMGWINTYTGESTYADDFKGRFAFSLDTSASTAYLQLSSLRSEDTAVYFCARFAIKGDYWGQGTLVTVSSGPHHHHHH

SEQ ID NO: 19 - protein, 275 aa, Artificial Sequence
  Description of Artificial Sequence: Synthetic polypeptide
MEFGLSWVFLVALFRGVQCQVQLVQSGAEDVKPDASVKLSCKASGYTFTDYYMHWVRQAPGQGLEWMGRVNPNRRGTTYNQKFEGRVTMTTDTSTSTAYMQLSSLRGEDTAVYYCARANWLDYWGQGTTVTVSSASTGGGGSGGGGSGGGGSGGGGSDIQMTQSPSSLEASVGDRVTITCSVSSSVSSIYLHWYQQKPGKSPKLLIYSTSNLASGVPDRFSGSGSGTDFTLTISSLQAEDEGTYYCQVYSGYPLTFGGGTKLEIKRTGPHHHHHH

SEQ ID NO: 20 - protein, 273 aa, Artificial Sequence
  Description of Artificial Sequence: Synthetic polypeptide
METDTLLLWVLLLWVPGSTGDIQMTQSPSSLSASVGDRVTITCSVSSSVSSIYLHWYQQKPGKAPKLLIYSTSNLASGVPSRFSGSGSGTDFTLTISSLQPEDEATYYCQVYSGYPLTFGCGTKVEIKRTGGGGSGGGGSGGGGSGGGGSQVQLVQSGAEDKKPGASVKVSCKASGYTFTDYYMHWVRQAPGQCLEWMGRVNPNRRGTTYNQKFEGRVTMTTDTSTSTAYMELRSLRSDDTAVYYCARANWLDYWGQGTTVTVSSGPHHHHHH

SEQ ID NO: 21 - protein, 278 aa, Artificial Sequence
  Description of Artificial Sequence: Synthetic polypeptide
MEFGLSWVFLVALFRGVQCQVQLQESGPGDVKPSETLSLTCTVSGGSVSSGDYYWTWIRQSPGKGLEWIGHIYYSGNTNYNPSLKSRLTISIDTSKTTFSLQLSSVTGEDTAIYYCVRDRVTGAFDIWGQGTTVTVSSASTGGGGSGGGGSGGGGSGGGGSDIQMTQSPSSLEASVGDRVTITCQASQDISNYLNWYQQKPGKSPKLLIYDASNLETGVPDRFSGSGSGTDFTFTISSLQAEDEGTYFCQHFDHLPLAFGGGTKLEIKRTGPHHHHHH

SEQ ID NO: 22 - protein, 276 aa, Artificial Sequence
  Description of Artificial Sequence: Synthetic polypeptide
METDTLLLWVLLLWVPGSTGDIQMTQSPSSLSASVGDRVTITCQASQDISNYLNWYQQKPGKAPKLLIYDASNLETGVPSRFSGSGSGTDFTFTISSLQPEDEATYFCQHFDHLPLAFGCGTKVEIKRTGGGGSGGGGSGGGGSGGGGSQVQLQESGPGDVKPSETLSLTCTVSGGSVSSGDYYWTWIRQSPGKCLEWIGHIYYSGNTNYNPSLKSRLTISIDTSKTQFSLKLSSVTAADTAIYYCVRDRVTGAFDIWGQGTTVTVSSGPHHHHHH

SEQ ID NO: 23 - protein, 456 aa, Artificial Sequence
  Description of Artificial Sequence: Synthetic polypeptide
MPPPRLLFFLLFLTPMEVRHHHHHHPEEPLVVKVEEGDNAVLQCLKGTSDGPTQQLTWSRESPLKPFLKLSLGLPGLGIHMRPLAIWLFIFNVSQQMGGFYLCQPGPPSEKAWQPGWTVNVEGSGELFRWNVSDLGGLGCGLKNRSSEGPSSPSGKLMSPKLYVWAKDRPEIWEGEPPCLPPRDSLNQSLSQDLTMAPGSTLWLSCGVPPDSVSRGPLSWTHVHPKGPKSLLSLELKDDRPARDMWVMETGLLLPRATAQDAGKYYCHRGNLTMSFHLEITARPGGGGSGGGGSGGGGSVRSSSRTPSDKPVAHVVANPQAEGQLQWLNRRANALLANGVELRDNQLVVPSEGLYLIYSQVLFKGQGCPSTHVLLTHTISRIAVSYQTKVNLLSAIKSPCQRETPEGAEAKPWYEPIYLGGVFQLEKGDRLSAEINRPDYLDFAESGQVYFGIIAL

SEQ ID NO: 24 - protein, 398 aa, Artificial Sequence
  Description of Artificial Sequence: Synthetic polypeptide
MEFGLSWVFLVALFRGVQCEVQLVESGGGLVQPGGSLRLSCAASGFNIKDTYIHWVRQAPGKGLEWVARIYPTNGYTRYADSVKGRFTISADTSKNTAYLQMNSLRAEDTAVYYCSRWGGDGFYAMDYWGQGTLVTVSSASTGGGGSGGGGSGGGGSDIQMTQSPSSLSASVGDRVTITCRASQDVNTAVAWYQQKPGKAPKLLIYSASFLYSGVPSRFSGSRSGTDFTLTISSLQPEDFATYYCQQHYTTPPTFGQGTKVEIKRTDKTHTSPPSPAPEAAGGPSEVRPEEPLVVKVEEGDNAVLQCLKGTSDGPTQQLTWSRESPLKPFLKLSLGLPGLGIHMRPLAIWLFIFNVSQQMGGFYLCQPGPPSEKAWQPGWTVNVEGSGSRGPHHHHHH

SEQ ID NO: 25 - protein, 614 aa, Artificial Sequence
  Description of Artificial Sequence: Synthetic polypeptide
MEFGLSWVFLVALFRGVQCEVQLVESGGGLVQPGGSLRLSCAASGFNIKDTYIHWVRQAPGKGLEWVARIYPTNGYTRYADSVKGRFTISADTSKNTAYLQMNSLRAEDTAVYYCSRWGGDGFYAMDYWGQGTLVTVSSASTGGGGSGGGGSGGGGSDIQMTQSPSSLSASVGDRVTITCRASQDVNTAVAWYQQKPGKAPKLLIYSASFLYSGVPSRFSGSRSGTDFTLTISSLQPEDFATYYCQQHYTTPPTFGQGTKVEIKRTDKTHTSPPSPAPEAAGGPSEVRPEEPLVVKVEEGDNAVLQCLKGTSDGPTQQLTWSRESPLKPFLKLSLGLPGLGIHMRPLAIWLFIFNVSQQMGGFYLCQPGPPSEKAWQPGWTVNVEGSGDKTHTCPPCPAPELLGGPSVFLFPPKPKDTLMISRTPEVTCVVVDVSHEDPEVKFNWYVDGVEVHNAKTKPREEQYNSTYRVVSVLTVLHQDWLNGKEYKCKVSNKALPAPIEKTISKAKGQPREPQVYTLPPSREEMTKNQVSLTCLVKGFYPSDIAVEWESNGQPENNYKTTPPVLDSDGSFFLYSKLTVDKSRWQQGNVFSCSVMHEALHNHYTQKSLSLSPG

SEQ ID NO: 26 - protein, 396 aa, Artificial Sequence
  Description of Artificial Sequence: Synthetic polypeptide
MPPPRLLFFLLFLTPMEVRPEEPLVVKVEEGDNAVLQCLKGTSDGPTQQLTWSRESPLKPFLKLSLGLPGLGIHMRPLAIWLFIFNVSQQMGGFYLCQPGPPSEKAWQPGWTVNVEGSGGGGGSGGGGSGGGGSGGGGSEVQLVESGGGLVQPGGSLRLSCAASGFNIKDTYIHWVRQAPGKGLEWVARIYPTNGYTRYADSVKGRFTISADTSKNTAYLQMNSLRAEDTAVYYCSRWGGDGFYAMDYWGQGTLVTVSSASTGGGGSGGGGSGGGGSDIQMTQSPSSLSASVGDRVTITCRASQDVNTAVAWYQQKPGKAPKLLIYSASFLYSGVPSRFSGSRSGTDFTLTISSLQPEDFATYYCQQHYTTPPTFGQGTKVEIKRTSRGPHHHHHH

SEQ ID NO: 27 - protein, 612 aa, Artificial Sequence
  Description of Artificial Sequence: Synthetic polypeptide
MPPPRLLFFLLFLTPMEVRPEEPLVVKVEEGDNAVLQCLKGTSDGPTQQLTWSRESPLKPFLKLSLGLPGLGIHMRPLAIWLFIFNVSQQMGGFYLCQPGPPSEKAWQPGWTVNVEGSGGGGGSGGGGSGGGGSGGGGSEVQLVESGGGLVQPGGSLRLSCAASGFNIKDTYIHWVRQAPGKGLEWVARIYPTNGYTRYADSVKGRFTISADTSKNTAYLQMNSLRAEDTAVYYCSRWGGDGFYAMDYWGQGTLVTVSSASTGGGGSGGGGSGGGGSDIQMTQSPSSLSASVGDRVTITCRASQDVNTAVAWYQQKPGKAPKLLIYSASFLYSGVPSRFSGSRSGTDFTLTISSLQPEDFATYYCQQHYTTPPTFGQGTKVEIKRTDKTHTCPPCPAPELLGGPSVFLFPPKPKDTLMISRTPEVTCVVVDVSHEDPEVKFNWYVDGVEVHNAKTKPREEQYNSTYRVVSVLTVLHQDWLNGKEYKCKVSNKALPAPIEKTISKAKGQPREPQVYTLPPSREEMTKNQVSLTCLVKGFYPSDIAVEWESNGQPENNYKTTPPVLDSDGSFFLYSKLTVDKSRWQQGNVFSCSVMHEALHNHYTQKSLSLSPG

SEQ ID NO: 28 - protein, 284 aa, Artificial Sequence
  Description of Artificial Sequence: Synthetic polypeptide
MPPPRLLFFLLFLTPMEVRPEEPLVVKVEEGDNAVLQCLKGTSDGPTQQLTWSRESPLKPFLKLSLGLPGLGIHMRPLAIWLFIFNVSQQMGGFYLCQPGPPSEKAWQPGWTVNVEGSGELFRWNVSDLGGLGCGLKNRSSEGPSSPSGKLMSPKLYVWAKDRPEIWEGEPPCLPPRDSLNQSLSQDLTMAPGSTLWLSCGVPPDSVSRGPLSWTHVHPKGPKSLLSLELKDDRPARDMWVMETGLLLPRATAQDAGKYYCHRGNLTMSFHLEITARPHHHHHH

SEQ ID NO: 29 - protein, 504 aa, Artificial Sequence
  Description of Artificial Sequence: Synthetic polypeptide
MPPPRLLFFLLFLTPMEVRPEEPLVVKVEEGDNAVLQCLKGTSDGPTQQLTWSRESPLKPFLKLSLGLPGLGIHMRPLAIWLFIFNVSQQMGGFYLCQPGPPSEKAWQPGWTVNVEGSGELFRWNVSDLGGLGCGLKNRSSEGPSSPSGKLMSPKLYVWAKDRPEIWEGEPPCLPPRDSLNQSLSQDLTMAPGSTLWLSCGVPPDSVSRGPLSWTHVHPKGPKSLLSLELKDDRPARDMWVMETGLLLPRATAQDAGKYYCHRGNLTMSFHLEITARPDKTHTCPPCPAPELLGGPSVFLFPPKPKDTLMISRTPEVTCVVVDVSHEDPEVKFNWYVDGVEVHNAKTKPREEQYNSTYRVVSVLTVLHQDWLNGKEYKCKVSNKALPAPIEKTISKAKGQPREPQVYTLPPSREEMTKNQVSLTCLVKGFYPSDIAVEWESNGQPENNYKTTPPVLDSDGSFFLYSKLTVDKSRWQQGNVFSCSVMHEALHNHYTQKSLSLSPG

SEQ ID NO: 30 - protein, 128 aa, Artificial Sequence
  Description of Artificial Sequence: Synthetic polypeptide
MPPPRLLFFLLFLTPMEVRPRDSLNQSLSQDLTMAPGSTLWLSCGVPPDSVSRGPLSWTHVHPKGPKSLLSLELKDDRPARDMWVMETGLLLPRATAQDAGKYYCHRGNLTMSFHLEITARPHHHHHH

SEQ ID NO: 31 - protein, 348 aa, Artificial Sequence
  Description of Artificial Sequence: Synthetic polypeptide
MPPPRLLFFLLFLTPMEVRPRDSLNQSLSQDLTMAPGSTLWLSCGVPPDSVSRGPLSWTHVHPKGPKSLLSLELKDDRPARDMWVMETGLLLPRATAQDAGKYYCHRGNLTMSFHLEITARPDKTHTCPPCPAPELLGGPSVFLFPPKPKDTLMISRTPEVTCVVVDVSHEDPEVKFNWYVDGVEVHNAKTKPREEQYNSTYRVVSVLTVLHQDWLNGKEYKCKVSNKALPAPIEKTISKAKGQPREPQVYTLPPSREEMTKNQVSLTCLVKGFYPSDIAVEWESNGQPENNYKTTPPVLDSDGSFFLYSKLTVDKSRWQQGNVFSCSVMHEALHNHYTQKSLSLSPG

SEQ ID NO: 32 - protein, 507 aa, Artificial Sequence
  Description of Artificial Sequence: Synthetic polypeptide
MPPPRLLFFLLFLTPMEVRPEEPLVVKVEEGDNAVLQCLKGTSDGPTQQLTWSRESPLKPFLKLSLGLPGLGIHMRPLAIWLFIFNVSQQMGGFYLCQPGPPSEKAWQPGWTVNVEGSGELFRWNVSDLGGLGCGLKNRSSEGPSSPSGKLMSPKLYVWAKDRPEIWEGEPPCLPPRDSLNQSLSQDLTMAPGSTLWLSCGVPPDSVSRGPLSWTHVHPKGPKSLLSLELKDDRPARDMWVMETGLLLPRATAQDAGKYYCHRGNLTMSFHLEITARPGGGGSGGGGSGGGGSDIQMTQSPSSLSASVGDRVTITCQASQDISNYLNWYQQKPGKAPKLLIYDASNLETGVPSRFSGSGSGTDFTFTISSLQPEDIATYFCQHFDHLPLAFGGGTKVEIKRTVAAPSVFIFPPSDEQLKSGTASVVCLLNNFYPREAKVQWKVDNALQSGNSQESVTEQDSKDSTYSLSSTLTLSKADYEKHKVYACEVTHQGLSSPVTKSFNRGEC

SEQ ID NO: 33 - protein, 737 aa, Artificial Sequence
  Description of Artificial Sequence: Synthetic polypeptide
MPPPRLLFFLLFLTPMEVRPEEPLVVKVEEGDNAVLQCLKGTSDGPTQQLTWSRESPLKPFLKLSLGLPGLGIHMRPLAIWLFIFNVSQQMGGFYLCQPGPPSEKAWQPGWTVNVEGSGELFRWNVSDLGGLGCGLKNRSSEGPSSPSGKLMSPKLYVWAKDRPEIWEGEPPCLPPRDSLNQSLSQDLTMAPGSTLWLSCGVPPDSVSRGPLSWTHVHPKGPKSLLSLELKDDRPARDMWVMETGLLLPRATAQDAGKYYCHRGNLTMSFHLEITARPGGGGSGGGGSGGGGSQVQLQESGPGLVKPSETLSLTCTVSGGSVSSGDYYWTWIRQSPGKGLEWIGHIYYSGNTNYNPSLKSRLTISIDTSKTQFSLKLSSVTAADTAIYYCVRDRVTGAFDIWGQGTMVTVSSASTKGPSVFPLAPCSRSTSESTAALGCLVKDYFPEPVTVSWNSGALTSGVHTFPAVLQSSGLYSLSSVVTVPSSNFGTQTYTCNVDHKPSNTKVDKTVERKCCVECPPCPAPPVAGPSVFLFPPKPKDTLMISRTPEVTCVVVDVSHEDPEVQFNWYVDGVEVHNAKTKPREEQFQSTFRVVSVLTVVHQDWLNGKEYKCKVSNKGLPAPIEKTISKTKGQPREPQVYTLPPSREEMTKNQVSLTCLVKGFYPSDIAVEWESNGQPENNYKTTPPMLDSDGSFFLYSKLTVDKSRWQQGNVFSCSVMHEALHNHYTQKSLSLSPG

SEQ ID NO: 34 - protein, 512 aa, Artificial Sequence
  Description of Artificial Sequence: Synthetic polypeptide
METDTLLLWVLLLWVPGSTGDIQMTQSPSSLSASVGDRVTITCQASQDISNYLNWYQQKPGKAPKLLIYDASNLETGVPSRFSGSGSGTDFTFTISSLQPEDIATYFCQHFDHLPLAFGGGTKVEIKRTVAAPSVFIFPPSDEQLKSGTASVVCLLNNFYPREAKVQWKVDNALQSGNSQESVTEQDSKDSTYSLSSTLTLSKADYEKHKVYACEVTHQGLSSPVTKSFNRGECDKTHTSPPSPAPEAAGGPSPEEPLVVKVEEGDNAVLQCLKGTSDGPTQQLTWSRESPLKPFLKLSLGLPGLGIHMRPLAIWLFIFNVSQQMGGFYLCQPGPPSEKAWQPGWTVNVEGSGELFRWNVSDLGGLGCGLKNRSSEGPSSPSGKLMSPKLYVWAKDRPEIWEGEPPCLPPRDSLNQSLSQDLTMAPGSTLWLSCGVPPDSVSRGPLSWTHVHPKGPKSLLSLELKDDRPARDMWVMETGLLLPRATAQDAGKYYCHRGNLTMSFHLEITARP

SEQ ID NO: 35 - protein, 737 aa, Artificial Sequence
  Description of Artificial Sequence: Synthetic polypeptide
MEFGLSWVFLVALFRGVQCQVQLQESGPGLVKPSETLSLTCTVSGGSVSSGDYYWTWIRQSPGKGLEWIGHIYYSGNTNYNPSLKSRLTISIDTSKTQFSLKLSSVTAADTAIYYCVRDRVTGAFDIWGQGTMVTVSSASTKGPSVFPLAPCSRSTSESTAALGCLVKDYFPEPVTVSWNSGALTSGVHTFPAVLQSSGLYSLSSVVTVPSSNFGTQTYTCNVDHKPSNTKVDKTVERKCCVECPPCPAPPVAGPSVFLFPPKPKDTLMISRTPEVTCVVVDVSHEDPEVQFNWYVDGVEVHNAKTKPREEQFQSTFRVVSVLTVVHQDWLNGKEYKCKVSNKGLPAPIEKTISKTKGQPREPQVYTLPPSREEMTKNQVSLTCLVKGFYPSDIAVEWESNGQPENNYKTTPPMLDSDGSFFLYSKLTVDKSRWQQGNVFSCSVMHEALHNHYTQKSLSLSPGGGGGSGGGGSGGGGSPEEPLVVKVEEGDNAVLQCLKGTSDGPTQQLTWSRESPLKPFLKLSLGLPGLGIHMRPLAIWLFIFNVSQQMGGFYLCQPGPPSEKAWQPGWTVNVEGSGELFRWNVSDLGGLGCGLKNRSSEGPSSPSGKLMSPKLYVWAKDRPEIWEGEPPCLPPRDSLNQSLSQDLTMAPGSTLWLSCGVPPDSVSRGPLSWTHVHPKGPKSLLSLELKDDRPARDMWVMETGLLLPRATAQDAGKYYCHRGNLTMSFHLEITARP

SEQ ID NO: 36 - protein, 508 aa, Artificial Sequence
  Description of Artificial Sequence: Synthetic polypeptide
MPPPRLLFFLLFLTPMEVRPEEPLVVKVEEGDNAVLQCLKGTSDGPTQQLTWSRESPLKPFLKLSLGLPGLGIHMRPLAIWLFIFNVSQQMGGFYLCQPGPPSEKAWQPGWTVNVEGSGELFRWNVSDLGGLGCGLKNRSSEGPSSPSGKLMSPKLYVWAKDRPEIWEGEPPCLPPRDSLNQSLSQDLTMAPGSTLWLSCGVPPDSVSRGPLSWTHVHPKGPKSLLSLELKDDRPARDMWVMETGLLLPRATAQDAGKYYCHRGNLTMSFHLEITARPGGGGSGGGGSGGGGSDIQMTQSPSSLSASVGDRVTITCSVSSSVSSIYLHWYQQKPGKAPKLLIYSTSNLASGVPSRFSGSGSGTDFTLTISSLQPEDFATYYCQVYSGYPLTFGGGTKVEIKRTVAAPSVFIFPPSDEQLKSGTASVVCLLNNFYPREAKVQWKVDNALQSGNSQESVTEQDSKDSTYSLSSTLTLSKADYEKHKVYACEVTHQGLSSPVTKSFNRGEC

SEQ ID NO: 37 - protein, 733 aa, Artificial Sequence
  Description of Artificial Sequence: Synthetic polypeptide
MPPPRLLFFLLFLTPMEVRPEEPLVVKVEEGDNAVLQCLKGTSDGPTQQLTWSRESPLKPFLKLSLGLPGLGIHMRPLAIWLFIFNVSQQMGGFYLCQPGPPSEKAWQPGWTVNVEGSGELFRWNVSDLGGLGCGLKNRSSEGPSSPSGKLMSPKLYVWAKDRPEIWEGEPPCLPPRDSLNQSLSQDLTMAPGSTLWLSCGVPPDSVSRGPLSWTHVHPKGPKSLLSLELKDDRPARDMWVMETGLLLPRATAQDAGKYYCHRGNLTMSFHLEITARPGGGGSGGGGSGGGGSQVQLVQSGAEVKKPGASVKVSCKASGYTFTDYYMHWVRQAPGQGLEWMGRVNPNRRGTTYNQKFEGRVTMTTDTSTSTAYMELRSLRSDDTAVYYCARANWLDYWGQGTTVTVSSASTKGPSVFPLAPCSRSTSESTAALGCLVKDYFPEPVTVSWNSGALTSGVHTFPAVLQSSGLYSLSSVVTVPSSSLGTKTYTCNVDHKPSNTKVDKRVESKYGPPCPPCPAPEAAGGPSVFLFPPKPKDTLMISRTPEVTCVVVDVSQEDPEVQFNWYVDGVEVHNAKTKPREEQFNSTYRVVSVLTVLHQDWLNGKEYKCKVSNKGLPSSIEKTISKAKGQPREPQVYTLPPSQEEMTKNQVSLTCLVKGFYPSDIAVEWESNGQPENNYKTTPPVLDSDGSFFLYSRLTVDKSRWQEGNVFSCSVMHEALHNHYTQKSLSLSL

SEQ ID NO: 38 - protein, 513 aa, Artificial Sequence
  Description of Artificial Sequence: Synthetic polypeptide
METDTLLLWVLLLWVPGSTGDIQMTQSPSSLSASVGDRVTITCSVSSSVSSIYLHWYQQKPGKAPKLLIYSTSNLASGVPSRFSGSGSGTDFTLTISSLQPEDFATYYCQVYSGYPLTFGGGTKVEIKRTVAAPSVFIFPPSDEQLKSGTASVVCLLNNFYPREAKVQWKVDNALQSGNSQESVTEQDSKDSTYSLSSTLTLSKADYEKHKVYACEVTHQGLSSPVTKSFNRGECDKTHTSPPSPAPEAAGGPSPEEPLVVKVEEGDNAVLQCLKGTSDGPTQQLTWSRESPLKPFLKLSLGLPGLGIHMRPLAIWLFIFNVSQQMGGFYLCQPGPPSEKAWQPGWTVNVEGSGELFRWNVSDLGGLGCGLKNRSSEGPSSPSGKLMSPKLYVWAKDRPEIWEGEPPCLPPRDSLNQSLSQDLTMAPGSTLWLSCGVPPDSVSRGPLSWTHVHPKGPKSLLSLELKDDRPARDMWVMETGLLLPRATAQDAGKYYCHRGNLTMSFHLEITARP

SEQ ID NO: 39 - protein, 734 aa, Artificial Sequence
  Description of Artificial Sequence: Synthetic polypeptide
MEFGLSWVFLVALFRGVQCQVQLVQSGAEVKKPGASVKVSCKASGYTFTDYYMHWVRQAPGQGLEWMGRVNPNRRGTTYNQKFEGRVTMTTDTSTSTAYMELRSLRSDDTAVYYCARANWLDYWGQGTTVTVSSASTKGPSVFPLAPCSRSTSESTAALGCLVKDYFPEPVTVSWNSGALTSGVHTFPAVLQSSGLYSLSSVVTVPSSSLGTKTYTCNVDHKPSNTKVDKRVESKYGPPCPPCPAPEAAGGPSVFLFPPKPKDTLMISRTPEVTCVVVDVSQEDPEVQFNWYVDGVEVHNAKTKPREEQFNSTYRVVSVLTVLHQDWLNGKEYKCKVSNKGLPSSIEKTISKAKGQPREPQVYTLPPSQEEMTKNQVSLTCLVKGFYPSDIAVEWESNGQPENNYKTTPPVLDSDGSFFLYSRLTVDKSRWQEGNVFSCSVMHEALHNHYTQKSLSLSLGGGGGSGGGGSGGGGSPEEPLVVKVEEGDNAVLQCLKGTSDGPTQQLTWSRESPLKPFLKLSLGLPGLGIHMRPLAIWLFIFNVSQQMGGFYLCQPGPPSEKAWQPGWTVNVEGSGELFRWNVSDLGGLGCGLKNRSSEGPSSPSGKLMSPKLYVWAKDRPEIWEGEPPCLPPRDSLNQSLSQDLTMAPGSTLWLSCGVPPDSVSRGPLSWTHVHPKGPKSLLSLELKDDRPARDMWVMETGLLLPRATAQDAGKYYCHRGNLTMSFHLEITARP

SEQ ID NO: 40 - protein, 554 aa, Artificial Sequence
  Description of Artificial Sequence: Synthetic polypeptide
MEFGLSWVFLVALFRGVQCEVQLVESGGGLVQPGGSLRLSCAASGFNIKDTYIHWVRQAPGKGLEWVARIYPTNGYTRYADSVKGRFTISADTSKNTAYLQMNSLRAEDTAVYYCSRWGGDGFYAMDYWGQGTLVTVSSASTGGGGSGGGGSGGGGSDIQMTQSPSSLSASVGDRVTITCRASQDVNTAVAWYQQKPGKAPKLLIYSASFLYSGVPSRFSGSRSGTDFTLTISSLQPEDFATYYCQQHYTTPPTFGQGTKVEIKRTDKTHTSPPSPAPEAAGGPSPEEPLVVKVEEGDNAVLQCLKGTSDGPTQQLTWSRESPLKPFLKLSLGLPGLGIHMRPLAIWLFIFNVSQQMGGFYLCQPGPPSEKAWQPGWTVNVEGSGELFRWNVSDLGGLGCGLKNRSSEGPSSPSGKLMSPKLYVWAKDRPEIWEGEPPCLPPRDSLNQSLSQDLTMAPGSTLWLSCGVPPDSVSRGPLSWTHVHPKGPKSLLSLELKDDRPARDMWVMETGLLLPRATAQDAGKYYCHRGNLTMSFHLEITARPSRGPHHHHHH

SEQ ID NO: 41 - protein, 770 aa, Artificial Sequence
  Description of Artificial Sequence: Synthetic polypeptide
MEFGLSWVFLVALFRGVQCEVQLVESGGGLVQPGGSLRLSCAASGFNIKDTYIHWVRQAPGKGLEWVARIYPTNGYTRYADSVKGRFTISADTSKNTAYLQMNSLRAEDTAVYYCSRWGGDGFYAMDYWGQGTLVTVSSASTGGGGSGGGGSGGGGSDIQMTQSPSSLSASVGDRVTITCRASQDVNTAVAWYQQKPGKAPKLLIYSASFLYSGVPSRFSGSRSGTDFTLTISSLQPEDFATYYCQQHYTTPPTFGQGTKVEIKRTDKTHTSPPSPAPEAAGGPSPEEPLVVKVEEGDNAVLQCLKGTSDGPTQQLTWSRESPLKPFLKLSLGLPGLGIHMRPLAIWLFIFNVSQQMGGFYLCQPGPPSEKAWQPGWTVNVEGSGELFRWNVSDLGGLGCGLKNRSSEGPSSPSGKLMSPKLYVWAKDRPEIWEGEPPCLPPRDSLNQSLSQDLTMAPGSTLWLSCGVPPDSVSRGPLSWTHVHPKGPKSLLSLELKDDRPARDMWVMETGLLLPRATAQDAGKYYCHRGNLTMSFHLEITARPDKTHTCPPCPAPELLGGPSVFLFPPKPKDTLMISRTPEVTCVVVDVSHEDPEVKFNWYVDGVEVHNAKTKPREEQYNSTYRVVSVLTVLHQDWLNGKEYKCKVSNKALPAPIEKTISKAKGQPREPQVYTLPPSREEMTKNQVSLTCLVKGFYPSDIAVEWESNGQPENNYKTTPPVLDSDGSFFLYSKLTVDKSRWQQGNVFSCSVMHEALHNHYTQKSLSLSPG

SEQ ID NO: 42 - protein, 555 aa, Artificial Sequence
  Description of Artificial Sequence: Synthetic polypeptide
MPPPRLLFFLLFLTPMEVRPEEPLVVKVEEGDNAVLQCLKGTSDGPTQQLTWSRESPLKPFLKLSLGLPGLGIHMRPLAIWLFIFNVSQQMGGFYLCQPGPPSEKAWQPGWTVNVEGSGELFRWNVSDLGGLGCGLKNRSSEGPSSPSGKLMSPKLYVWAKDRPEIWEGEPPCLPPRDSLNQSLSQDLTMAPGSTLWLSCGVPPDSVSRGPLSWTHVHPKGPKSLLSLELKDDRPARDMWVMETGLLLPRATAQDAGKYYCHRGNLTMSFHLEITARPGGGGSGGGGSGGGGSGGGGSEVQLVESGGGLVQPGGSLRLSCAASGFNIKDTYIHWVRQAPGKGLEWVARIYPTNGYTRYADSVKGRFTISADTSKNTAYLQMNSLRAEDTAVYYCSRWGGDGFYAMDYWGQGTLVTVSSASTGGGGSGGGGSGGGGSDIQMTQSPSSLSASVGDRVTITCRASQDVNTAVAWYQQKPGKAPKLLIYSASFLYSGVPSRFSGSRSGTDFTLTISSLQPEDFATYYCQQHYTTPPTFGQGTKVEIKRTSRGPHHHHHH

SEQ ID NO: 43 - protein, 771 aa, Artificial Sequence
  Description of Artificial Sequence: Synthetic polypeptide
MPPPRLLFFLLFLTPMEVRPEEPLVVKVEEGDNAVLQCLKGTSDGPTQQLTWSRESPLKPFLKLSLGLPGLGIHMRPLAIWLFIFNVSQQMGGFYLCQPGPPSEKAWQPGWTVNVEGSGELFRWNVSDLGGLGCGLKNRSSEGPSSPSGKLMSPKLYVWAKDRPEIWEGEPPCLPPRDSLNQSLSQDLTMAPGSTLWLSCGVPPDSVSRGPLSWTHVHPKGPKSLLSLELKDDRPARDMWVMETGLLLPRATAQDAGKYYCHRGNLTMSFHLEITARPGGGGSGGGGSGGGGSGGGGSEVQLVESGGGLVQPGGSLRLSCAASGFNIKDTYIHWVRQAPGKGLEWVARIYPTNGYTRYADSVKGRFTISADTSKNTAYLQMNSLRAEDTAVYYCSRWGGDGFYAMDYWGQGTLVTVSSASTGGGGSGGGGSGGGGSDIQMTQSPSSLSASVGDRVTITCRASQDVNTAVAWYQQKPGKAPKLLIYSASFLYSGVPSRFSGSRSGTDFTLTISSLQPEDFATYYCQQHYTTPPTFGQGTKVEIKRTDKTHTCPPCPAPELLGGPSVFLFPPKPKDTLMISRTPEVTCVVVDVSHEDPEVKFNWYVDGVEVHNAKTKPREEQYNSTYRVVSVLTVLHQDWLNGKEYKCKVSNKALPAPIEKTISKAKGQPREPQVYTLPPSREEMTKNQVSLTCLVKGFYPSDIAVEWESNGQPENNYKTTPPVLDSDGSFFLYSKLTVDKSRWQQGNVFSCSVMHEALHNHYTQKSLSLSPG

SEQ ID NO: 44-45 - skipped (2 entries)

SEQ ID NO: 46 - protein, 234 aa, Artificial Sequence
  Description of Artificial Sequence: Synthetic polypeptide
MESDESGLPAMEIECRITGTLNGVEFELVGGGEGTPEQGRMTNKMKSTKGALTFSPYLLSHVMGYGFYHFGTYPSGYENPFLHAINNGGYTNTRIEKYEDGGVLHVSFSYRYEAGRVIGDFKVMGTGFPEDSVIFTDKIIRSNATVEHLHPMGDNDLDGSFTRTFSLRDGGYYSSVVDSHMHFKSAIHPSILQNGGPMFAFRRVEEDHSNTELGIVEYQHAFKTPDADAGEERV

SEQ ID NO: 47 - protein, 234 aa, Artificial Sequence; identical to SEQ ID NO: 46
  Description of Artificial Sequence: Synthetic polypeptide

SEQ ID NO: 48 - protein, 234 aa, Artificial Sequence; identical to SEQ ID NO: 46
  Description of Artificial Sequence: Synthetic polypeptide

SEQ ID NO: 49 - protein, 234 aa, Artificial Sequence; identical to SEQ ID NO: 46
  Description of Artificial Sequence: Synthetic polypeptide

SEQ ID NO: 50 - protein, 755 aa, Artificial Sequence
  Description of Artificial Sequence: Synthetic polypeptide
MPPPRLLFFLLFLTPMEVRPEEPLVVKVEEGDNAVLQCLKGTSDGPTQQLTWSRESPLKPFLKLSLGLPGLGIHMRPLAIWLFIFNVSQQMGGFYLCQPGPPSEKAWQPGWTVNVEGSGELFRWNVSDLGGLGCGLKNRSSEGPSSPSGKLMSPKLYVWAKDRPEIWEGEPPCLPPRDSLNQSLSQDLTMAPGSTLWLSCGVPPDSVSRGPLSWTHVHPKGPKSLLSLELKDDRPARDMWVMETGLLLPRATAQDAGKYYCHRGNLTMSFHLEITARPVLWHWLLRTGGWKGGGGSGGGGSGGGGSGGGGSQVQLQESGPGLVKPSETLSLTCTVSGGSVSSGDYYWTWIRQSPGKGLEWIGHIYYSGNTNYNPSLKSRLTISIDTSKTQFSLKLSSVTAADTAIYYCVRDRVTGAFDIWGQGTMVTVSSASTKGPSVFPLAPCSRSTSESTAALGCLVKDYFPEPVTVSWNSGALTSGVHTFPAVLQSSGLYSLSSVVTVPSSNFGTQTYTCNVDHKPSNTKVDKTVERKCCVECPPCPAPPVAGPSVFLFPPKPKDTLMISRTPEVTCVVVDVSHEDPEVQFNWYVDGVEVHNAKTKPREEQFQSTFRVVSVLTVVHQDWLNGKEYKCKVSNKGLPAPIEKTISKTKGQPREPQVYTLPPSREEMTKNQVSLTCLVKGFYPSDIAVEWESNGQPENNYKTTPPMLDSDGSFFLYSKLTVDKSRWQQGNVFSCSVMHEALHNHYTQKSLSLSPG

SEQ ID NO: 51 - protein, 751 aa, Artificial Sequence
  Description of Artificial Sequence: Synthetic polypeptide
MPPPRLLFFLLFLTPMEVRPEEPLVVKVEEGDNAVLQCLKGTSDGPTQQLTWSRESPLKPFLKLSLGLPGLGIHMRPLAIWLFIFNVSQQMGGFYLCQPGPPSEKAWQPGWTVNVEGSGELFRWNVSDLGGLGCGLKNRSSEGPSSPSGKLMSPKLYVWAKDRPEIWEGEPPCLPPRDSLNQSLSQDLTMAPGSTLWLSCGVPPDSVSRGPLSWTHVHPKGPKSLLSLELKDDRPARDMWVMETGLLLPRATAQDAGKYYCHRGNLTMSFHLEITARPVLWHWLLRTGGWKGGGGSGGGGSGGGGSGGGGSQVQLVQSGAEVKKPGASVKVSCKASGYTFTDYYMHWVRQAPGQGLEWMGRVNPNRRGTTYNQKFEGRVTMTTDTSTSTAYMELRSLRSDDTAVYYCARANWLDYWGQGTTVTVSSASTKGPSVFPLAPCSRSTSESTAALGCLVKDYFPEPVTVSWNSGALTSGVHTFPAVLQSSGLYSLSSVVTVPSSSLGTKTYTCNVDHKPSNTKVDKRVESKYGPPCPPCPAPEAAGGPSVFLFPPKPKDTLMISRTPEVTCVVVDVSQEDPEVQFNWYVDGVEVHNAKTKPREEQFNSTYRVVSVLTVLHQDWLNGKEYKCKVSNKGLPSSIEKTISKAKGQPREPQVYTLPPSQEEMTKNQVSLTCLVKGFYPSDIAVEWESNGQPENNYKTTPPVLDSDGSFFLYSRLTVDKSRWQEGNVFSCSVMHEALHNHYTQKSLSLSL

SEQ ID NO: 52 - protein, 570 aa, Artificial Sequence
  Description of Artificial Sequence: Synthetic polypeptide
MPPPRLLFFLLFLTPMEVRPEEPLVVKVEEGDNAVLQCLKGTSDGPTQQLTWSRESPLKPFLKLSLGLPGLGIHMRPLAIWLFIFNVSQQMGGFYLCQPGPPSEKAWQPGWTVNVEGSGELFRWNVSDLGGLGCGLKNRSSEGPSSPSGKLMSPKLYVWAKDRPEIWEGEPPCLPPRDSLNQSLSQDLTMAPGSTLWLSCGVPPDSVSRGPLSWTHVHPKGPKSLLSLELKDDRPARDMWVMETGLLLPRATAQDAGKYYCHRGNLTMSFHLEITARPVLWHWLLRTGGWKGGGGSGGGGSGGGGSGGGGSQVQLVQSGAEDKKPGESVKISCKASGYTFTNYGMNWVRQAPGQGLKWMGWINTYTGESTYADDFKGRFAFSLDTSASTAYLQLSSLRGEDTAVYFCARFAIKGDYWGQGTTVTVSSASTGGGGSGGGGSGGGGSGGGGSDIVMTQSPLSLEVSPGEPASISCRSTKSLLHSDGITYLYWYLQKPGQSPQLLIYQLSNLASGVPDRFSSSGSGTDFTLKISRVEAEDEGTYYCAQNLEIPRTFGQGTKLEIKRTHHHHHH

SEQ ID NO: 53 - protein, 565 aa, Artificial Sequence
  Description of Artificial Sequence: Synthetic polypeptide
MPPPRLLFFLLFLTPMEVRPEEPLVVKVEEGDNAVLQCLKGTSDGPTQQLTWSRESPLKPFLKLSLGLPGLGIHMRPLAIWLFIFNVSQQMGGFYLCQPGPPSEKAWQPGWTVNVEGSGELFRWNVSDLGGLGCGLKNRSSEGPSSPSGKLMSPKLYVWAKDRPEIWEGEPPCLPPRDSLNQSLSQDLTMAPGSTLWLSCGVPPDSVSRGPLSWTHVHPKGPKSLLSLELKDDRPARDMWVMETGLLLPRATAQDAGKYYCHRGNLTMSFHLEITARPVLWHWLLRTGGWKGGGGSGGGGSGGGGSGGGGSQVQLVQSGAEDVKPDASVKLSCKASGYTFTDYYMHWVRQAPGQGLEWMGRVNPNRRGTTYNQKFEGRVTMTTDTSTSTAYMQLSSLRGEDTAVYYCARANWLDYWGQGTTVTVSSASTGGGGSGGGGSGGGGSGGGGSDIQMTQSPSSLEASVGDRVTITCSVSSSVSSIYLHWYQQKPGKSPKLLIYSTSNLASGVPDRFSGSGSGTDFTLTISSLQAEDEGTYYCQVYSGYPLTFGGGTKLEIKRTHHHHHH

SEQ ID NO: 54 - protein, 568 aa, Artificial Sequence
  Description of Artificial Sequence: Synthetic polypeptide
MPPPRLLFFLLFLTPMEVRPEEPLVVKVEEGDNAVLQCLKGTSDGPTQQLTWSRESPLKPFLKLSLGLPGLGIHMRPLAIWLFIFNVSQQMGGFYLCQPGPPSEKAWQPGWTVNVEGSGELFRWNVSDLGGLGCGLKNRSSEGPSSPSGKLMSPKLYVWAKDRPEIWEGEPPCLPPRDSLNQSLSQDLTMAPGSTLWLSCGVPPDSVSRGPLSWTHVHPKGPKSLLSLELKDDRPARDMWVMETGLLLPRATAQDAGKYYCHRGNLTMSFHLEITARPVLWHWLLRTGGWKGGGGSGGGGSGGGGSGGGGSQVQLQESGPGDVKPSETLSLTCTVSGGSVSSGDYYWTWIRQSPGKGLEWIGHIYYSGNTNYNPSLKSRLTISIDTSKTTFSLQLSSVTGEDTAIYYCVRDRVTGAFDIWGQGTTVTVSSASTGGGGSGGGGSGGGGSGGGGSDIQMTQSPSSLEASVGDRVTITCQASQDISNYLNWYQQKPGKSPKLLIYDASNLETGVPDRFSGSGSGTDFTFTISSLQAEDEGTYFCQHFDHLPLAFGGGTKLEIKRTHHHHHH

SEQ ID NO: 55 - protein, 564 aa, Artificial Sequence
  Description of Artificial Sequence: Synthetic polypeptide
MPPPRLLFFLLFLTPMEVRPEEPLVVKVEEGDNAVLQCLKGTSDGPTQQLTWSRESPLKPFLKLSLGLPGLGIHMRPLAIWLFIFNVSQQMGGFYLCQPGPPSEKAWQPGWTVNVEGSGELFRWNVSDLGGLGCGLKNRSSEGPSSPSGKLMSPKLYVWAKDRPEIWEGEPPCLPPRDSLNQSLSQDLTMAPGSTLWLSCGVPPDSVSRGPLSWTHVHPKGPKSLLSLELKDDRPARDMWVMETGLLLPRATAQDAGKYYCHRGNLTMSFHLEITARPVLWHWLLRTGGWKGGGGSGGGGSGGGGSGGGGSEVQLVESGGGLVQPGGSLRLSCAASGFNIKDTYIHWVRQAPGKGLEWVARIYPTNGYTRYADSVKGRFTISADTSKNTAYLQMNSLRAEDTAVYYCSRWGGDGFYAMDYWGQGTLVTVSSASTGGGGSGGGGSGGGGSDIQMTQSPSSLSASVGDRVTITCRASQDVNTAVAWYQQKPGKAPKLLIYSASFLYSGVPSRFSGSRSGTDFTLTISSLQPEDFATYYCQQHYTTPPTFGQGTKVEIKRTHHHHHH

SEQ ID NO: 56 - protein, 784 aa, Artificial Sequence
  Description of Artificial Sequence: Synthetic polypeptide
MPPPRLLFFLLFLTPMEVRPEEPLVVKVEEGDNAVLQCLKGTSDGPTQQLTWSRESPLKPFLKLSLGLPGLGIHMRPLAIWLFIFNVSQQMGGFYLCQPGPPSEKAWQPGWTVNVEGSGELFRWNVSDLGGLGCGLKNRSSEGPSSPSGKLMSPKLYVWAKDRPEIWEGEPPCLPPRDSLNQSLSQDLTMAPGSTLWLSCGVPPDSVSRGPLSWTHVHPKGPKSLLSLELKDDRPARDMWVMETGLLLPRATAQDAGKYYCHRGNLTMSFHLEITARPVLWHWLLRTGGWKDKTHTCPPCPAPELLGGPSVFLFPPKPKDTLMISRTPEVTCVVVDVSHEDPEVKFNWYVDGVEVHNAKTKPREEQYNSTYRVVSVLTVLHQDWLNGKEYKCKVSNKALPAPIEKTISKAKGQPREPQVYTLPPSREEMTKNQVSLTCLVKGFYPSDIAVEWESNGQPENNYKTTPPVLDSDGSFFLYSKLTVDKSRWQQGNVFSCSVMHEALHNHYTQKSLSLSPGGGGGSGGGGSGGGGSGGGGSEVQLVESGGGLVQPGGSLRLSCAASGFNIKDTYIHWVRQAPGKGLEWVARIYPTNGYTRYADSVKGRFTISADTSKNTAYLQMNSLRAEDTAVYYCSRWGGDGFYAMDYWGQGTLVTVSSASTGGGGSGGGGSGGGGSDIQMTQSPSSLSASVGDRVTITCRASQDVNTAVAWYQQKPGKAPKLLIYSASFLYSGVPSRFSGSRSGTDFTLTISSLQPEDFATYYCQQHYTTPPTFGQGTKVEIKRT

SEQ ID NO: 57 - protein, 929 aa, Artificial Sequence
  Description of Artificial Sequence: Synthetic polypeptide
MELAALCRWGLLLALLPPGAASTQVCTGTDMKLRLPASPETHLDMLRHLYQGCQVVQGNLELTYLPTNASLSFLQDIQEVQGYVLIAHNQVRQVPLQRLRIVRGTQLFEDNYALAVLDNGDPLNNTTPVTGASPGGLRELQLRSLTEILKGGVLIQRNPQLCYQDTILWKDIFHKNNQLALTLIDTNRSRACHPCSPMCKGSRCWGESSEDCQSLTRTVCAGGCARCKGPLPTDCCHEQCAAGCTGPKHSDCLACLHFNHSGICELHCPALVTYNTDTFESMPNPEGRYTFGASCVTACPYNYLSTDVGSCTLVCPLHNQEVTAEDGTQRCEKCSKPCARVCYGLGMEHLREVRAVTSANIQEFAGCKKIFGSLAFLPESFDGDPASNTAPLQPEQLQVFETLEEITGYLYISAWPDSLPDLSVFQNLQVIRGRILHNGAYSLTLQGLGISWLGLRSLRELGSGLALIHHNTHLCFVHTVPWDQLFRNPHQALLHTANRPEDECVGEGLACHQLCARGHCWGPGPTQCVNCSQFLRGQECVEECRVLQGLPREYVNARHCLPCHPECQPQNGSVTCFGPEADQCVACAHYKDPPFCVARCPSGVKPDLSYMPIWKFPDEEGACQPCPINCTHSCVDLDDKGCPAEQRASPLTGGGGSGGGGSGGGGSGGGGSQVQLQESGPGDVKPSETLSLTCTVSGGSVSSGDYYWTWIRQSPGKGLEWIGHIYYSGNTNYNPSLKSRLTISIDTSKTTFSLQLSSVTGEDTAIYYCVRDRVTGAFDIWGQGTTVTVSSASTGGGGSGGGGSGGGGSGGGGSDIQMTQSPSSLEASVGDRVTITCQASQDISNYLNWYQQKPGKSPKLLIYDASNLETGVPDRFSGSGSGTDFTFTISSLQAEDEGTYFCQHFDHLPLAFGGGTKLEIKRTHHHHHH

SEQ ID NO: 58 - protein, 454 aa, Artificial Sequence
  Description of Artificial Sequence: Synthetic polypeptide
MELAALCRWGLLLALLPPGAASNRPEDECVGEGLACHQLCARGHCWGPGPTQCVNCSQFLRGQECVEECRVLQGLPREYVNARHCLPCHPECQPQNGSVTCFGPEADQCVACAHYKDPPFCVARCPSGVKPDLSYMPIWKFPDEEGACQPCPINCTHSCVDLDDKGCPAEQRASPLTGGGGSGGGGSGGGGSGGGGSQVQLQESGPGDVKPSETLSLTCTVSGGSVSSGDYYWTWIRQSPGKGLEWIGHIYYSGNTNYNPSLKSRLTISIDTSKTTFSLQLSSVTGEDTAIYYCVRDRVTGAFDIWGQGTTVTVSSASTGGGGSGGGGSGGGGSGGGGSDIQMTQSPSSLEASVGDRVTITCQASQDISNYLNWYQQKPGKSPKLLIYDASNLETGVPDRFSGSGSGTDFTFTISSLQAEDEGTYFCQHFDHLPLAFGGGTKLEIKRTHHHHHH

SEQ ID NO: 59-62 - skipped (4 entries)

SEQ ID NO: 63 - protein, 563 aa, Artificial Sequence
  Description of Artificial Sequence: Synthetic polypeptide
MPPPRLLFFLLFLTPMEVRPEEPLVVKVEEGDNAVLQCLKGTSDGPTQQLTWSRESPLKPFLKLSLGLPGLGIHMRPLAIWLFIFNVSQQMGGFYLCQPGPPSEKAWQPGWTVNVEGSGELFRWNVSDLGGLGCGLKNRSSEGPSSPSGKLMSPKLYVWAKDRPEIWEGEPPCLPPRDSLNQSLSQDLTMAPGSTLWLSCGVPPDSVSRGPLSWTHVHPKGPKSLLSLELKDDRPARDMWVMETGLLLPRATAQDAGKYYCHRGNLTMSFHLEITARPVLWHWLLRTGGWKGGGGSGGGGSGGGGSGGGGSEVQLQQSGAELVKPGASVKMSCKASGYTFTSYNMHWVKQTPGQGLEWIGAIYPGNGDTSYNQKFKGKATLTADKSSSTAYMQLSSLTSEDSADYYCARSNYYGSSYWFFDVWGAGTTVTVSSGSTSGGGSGGGSGGGGSSDIVLTQSPAILSASPGEKVTMTCRASSSVNYMDWYQKKPGSSPKPWIYATSNLASGVPARFSGSGSGTSYSLTISRVEAEDAATYYCQQWSFNPPTFGGGTKLEIKHHHHHH

SEQ ID NO: 64 - protein, 605 aa, Artificial Sequence
  Description of Artificial Sequence: Synthetic polypeptide
MHLLGPWLLLLVLEYLAFSDSSKWVFEHPETLYAWEGACVWIPCTYRALDGDLESFILFHNPEYNKNTSKFDGTRLYESTKDGKVPSEQKRVQFLGDKNKACTLSIHPVHLNDSGQLGLRMESKTEKWMERIHLNVSERPFPPHIQLPPEIQESQEVTLTCLLNFSCYGYPIQLQWLLEGVPMRQAAVTSTSLTIKSVFTRSELKFSPQWSHHGKIVTCQLQDADGKFLSNDTVQLNVKHTPKLEIKVTPSDAIVREGDSVTMTCEVSSSNPEYTTVSWLKDGTSLKKQNTFTLNLREVTKDQSGKYCCQVSNDVGPGRSEEVFLQVQYAPEGGGGSGGGGSGGGGSGGGGSDIQMTQTTSSLSASLGDRVTISCRASQDISKYLNWYQQKPDGTVKLLIYHTSRLHSGVPSRFSGSGSGTDYSLTISNLEQEDIATYFCQQGNTLPYTFGGGTKLEITGGGGSGGGGSGGGGSGGGGSEVKLQESGPGLVAPSQSLSVTCTVSGVSLPDYGVSWIRQPPRKGLEWLGVIWGSETTYYNSALKSRLTIIKDNSKSQVFLKMNSLQTDDTAIYYCAKHYYYGGSYAMDYWGQGTSVTVSSHHHHHH

SEQ ID NO: 65 - protein, 604 aa, Artificial Sequence
  Description of Artificial Sequence: Synthetic polypeptide
MHLLGPWLLLLVLEYLAFSDSSKWVFEHPETLYAWEGACVWIPCTYRALDGDLESFILFHNPEYNKNTSKFDGTRLYESTKDGKVPSEQKRVQFLGDKNKACTLSIHPVHLNDSGQLGLRMESKTEKWMERIHLNVSERPFPPHIQLPPEIQESQEVTLTCLLNFSCYGYPIQLQWLLEGVPMRQAAVTSTSLTIKSVFTRSELKFSPQWSHHGKIVTCQLQDADGKFLSNDTVQLNVKHTPKLEIKVTPSDAIVREGDSVTMTCEVSSSNPEYTTVSWLKDGTSLKKQNTFTLNLREVTKDQSGKYCCQVSNDVGPGRSEEVFLQVQYAPEGGGGSGGGGSGGGGSGGGGSEVQLQQSGAELVKPGASVKMSCKASGYTFTSYNMHWVKQTPGQGLEWIGAIYPGNGDTSYNQKFKGKATLTADKSSSTAYMQLSSLTSEDSADYYCARSNYYGSSYWFFDVWGAGTTVTVSSGSTSGGGSGGGSGGGGSSDIVLTQSPAILSASPGEKVTMTCRASSSVNYMDWYQKKPGSSPKPWIYATSNLASGVPARFSGSGSGTSYSLTISRVEAEDAATYYCQQWSFNPPTFGGGTKLEIKHHHHHH

SEQ ID NO: 66 - skipped

SEQ ID NO: 67 - protein, 579 aa, Artificial Sequence
  Description of Artificial Sequence: Synthetic polypeptide
MPPPRLLFFLLFLTPMEVRPEEPLVVKVEEGDNAVLQCLKGTSDGPTQQLTWSRESPLKPFLKLSLGLPGLGIHMRPLAIWLFIFNVSQQMGGFYLCQPGPPSEKAWQPGWTVNVEGSGELFRWNVSDLGGLGCGLKNRSSEGPSSPSGKLMSPKLYVWAKDRPEIWEGEPPCLPPRDSLNQSLSQDLTMAPGSTLWLSCGVPPDSVSRGPLSWTHVHPKGPKSLLSLELKDDRPARDMWVMETGLLLPRATAQDAGKYYCHRGNLTMSFHLEITARPVLWHWLLRTGGWKGGGGSGGGGSGGGGSGGGGSDILMTQSPSSMSVSLGDTVSITCHSSQDINSNIGWLQQRPGKSFKGLIYHGTNLDDEVPSRFSGSGSGADYSLTISSLESEDFADYYCVQYAQFPWTFGGGTKLEIKRGGGGSGGGGSGGGGSGGGGSMRVLILLWLFTAFPGVLSDVQLQESGPSLVKPSQSLSLTCTVTGYSITSDFAWNWIRQFPGNKLEWMGYISYSGNTRYNPSLKSRISITRDTSKNQFFLQLNSVTIEDTATYYCVTAGRGFPYWGQGTLVTVSAHHHHHH

SEQ ID NO: 68 - protein, 620 aa, Artificial Sequence
  Description of Artificial Sequence: Synthetic polypeptide
MHLLGPWLLLLVLEYLAFSDSSKWVFEHPETLYAWEGACVWIPCTYRALDGDLESFILFHNPEYNKNTSKFDGTRLYESTKDGKVPSEQKRVQFLGDKNKACTLSIHPVHLNDSGQLGLRMESKTEKWMERIHLNVSERPFPPHIQLPPEIQESQEVTLTCLLNFSCYGYPIQLQWLLEGVPMRQAAVTSTSLTIKSVFTRSELKFSPQWSHHGKIVTCQLQDADGKFLSNDTVQLNVKHTPKLEIKVTPSDAIVREGDSVTMTCEVSSSNPEYTTVSWLKDGTSLKKQNTFTLNLREVTKDQSGKYCCQVSNDVGPGRSEEVFLQVQYAPEGGGGSGGGGSGGGGSGGGGSDILMTQSPSSMSVSLGDTVSITCHSSQDINSNIGWLQQRPGKSFKGLIYHGTNLDDEVPSRFSGSGSGADYSLTISSLESEDFADYYCVQYAQFPWTFGGGTKLEIKRGGGGSGGGGSGGGGSGGGGSMRVLILLWLFTAFPGVLSDVQLQESGPSLVKPSQSLSLTCTVTGYSITSDFAWNWIRQFPGNKLEWMGYISYSGNTRYNPSLKSRISITRDTSKNQFFLQLNSVTIEDTATYYCVTAGRGFPYWGQGTLVTVSAHHHHHH

SEQ ID NO: 69-70 - skipped (2 entries)

SEQ ID NO: 71 - protein, 535 aa, Artificial Sequence
  Description of Artificial Sequence: Synthetic polypeptide
MLRLLLALNLFPSIQVTGDIQMTQTTSSLSASLGDRVTISCRASQDISKYLNWYQQKPDGTVKLLIYHTSRLHSGVPSRFSGSGSGTDYSLTISNLEQEDIATYFCQQGNTLPYTFGGGTKLEITGGGGSGGGGSGGGGSGGGGSEVKLQESGPGLVAPSQSLSVTCTVSGVSLPDYGVSWIRQPPRKGLEWLGVIWGSETTYYNSALKSRLTIIKDNSKSQVFLKMNSLQTDDTAIYYCAKHYYYGGSYAMDYWGQGTSVTVSSDYKDDDDKIEVMYPPPYLDNEKSNGTIIHVKGKHLCPSPLFPGPSKPFWVLVVVGGVLACYSLLVTVAFIIFWVRSKRSRLLHSDYMNMTPRRPGPTRKHYQPYAPPRDFAAYRSKRGRKKLLYIFKQPFMRPVQTTQEEDGCSCRFPEEEEGGCELRVKFSRSADAPAYQQGQNQLYNELNLGRREEYDVLDKRRGRDPEMGGKPQRRKNPQEGLYNELQKDKMAEAYSEIGMKGERRRGKGHDGLYQGLSTATKDTYDALHMQALPPR

SEQ ID NO: 72 - protein, 535 aa, Artificial Sequence; identical to SEQ ID NO: 71
  Description of Artificial Sequence: Synthetic polypeptide

SEQ ID NO: 73 - protein, 551 aa, Artificial Sequence
  Description of Artificial Sequence: Synthetic polypeptide
MPPPRLLFFLLFLTPMEVRPEEPLVVKVEEGDNAVLQCLKGTSDGPTQQLTWSRESPLKPFLKLSLGLPGLGIHMRPLAIWLFIFNVSQQMGGFYLCQPGPPSEKAWQPGWTVNVEGSGELFRWNVSDLGGLGCGLKNRSSEGPSSPSGKLMSPKLYVWAKDRPEIWEGEPPCLPPRDSLNQSLSQDLTMAPGSTLWLSCGVPPDSVSRGPLSWTHVHPKGPKSLLSLELKDDRPARDMWVMETGLLLPRATAQDAGKYYCHRGNLTMSFHLEITARPGGGGSGGGGSGGGGSGGGGSEVQLVESGGGLVQPGGSLRLSCAASGFNIKDTYIHWVRQAPGKGLEWVARIYPTNGYTRYADSVKGRFTISADTSKNTAYLQMNSLRAEDTAVYYCSRWGGDGFYAMDYWGQGTLVTVSSASTGGGGSGGGGSGGGGSDIQMTQSPSSLSASVGDRVTITCRASQDVNTAVAWYQQKPGKAPKLLIYSASFLYSGVPSRFSGSRSGTDFTLTISSLQPEDFATYYCQQHYTTPPTFGQGTKVEIKRTHHHHHH

SEQ ID NO: 74 - protein, 551 aa, Artificial Sequence; identical to SEQ ID NO: 73
  Description of Artificial Sequence: Synthetic polypeptide

SEQ ID NO: 75 - protein, 551 aa, Artificial Sequence; identical to SEQ ID NO: 73
  Description of Artificial Sequence: Synthetic polypeptide

SEQ ID NO: 76 - protein, 551 aa, Artificial Sequence; identical to SEQ ID NO: 73
  Description of Artificial Sequence: Synthetic polypeptide

SEQ ID NO: 77 - protein, 551 aa, Artificial Sequence; identical to SEQ ID NO: 73
  Description of Artificial Sequence: Synthetic polypeptide

SEQ ID NO: 78 - protein, 505 aa, Artificial Sequence
  Description of Artificial Sequence: Synthetic polypeptide
MDFQVQIFSFLLISASVIMSRMAQVKLQESGAELVKPGASVKMSCKASGYTFTSYNMHWVKQTPGQGLEWIGAIYPGNGDTSYNQKFKGKATLTADKSSSTAYMQLSSLTSEDSADYYCARSNYYGSSYWFFDVWGQGTTVTVSSGGGGSGGGGSGGGGSDIELTQSPTILSASPGEKVTMTCRASSSVNYMDWYQKKPGSSPKPWIYATSNLASGVPARFSGSGSGTSYSLTISRVEAEDAATYYCQQWSFNPPTFGGGTKLEIKRAAAGDPAEPKSPDKTHTCPPCPAPELLGGPSVFLFPPKPKDTLMISRTPEVTCVVVDVSHEDPEVKFNWYVDGVEVHNAKTKPREEQYNSTYRVVSVLTVLHQDWLNGKEYKCKVSNKALPAPIEKTISKAKGQPREPQVYTLPPSREEMTKNQVSLTCLVKGFYPSDIAVEWESNGQPENNYKTTPPVLDSDGSFFLYSKLTVDKSRWQQGNVFSCSVMHEALHNHYTQKSLSLSPG

SEQ ID NO: 79 - protein, 276 aa, Artificial Sequence
  Description of Artificial Sequence: Synthetic polypeptide
MDFQVQIFSFLLISASVIMSRMAQVKLQESGAELVKPGASVKMSCKASGYTFTSYNMHWVKQTPGQGLEWIGAIYPGNGDTSYNQKFKGKATLTADKSSSTAYMQLSSLTSEDSADYYCARSNYYGSSYWFFDVWGQGTTVTVSSGGGGSGGGGSGGGGSDIELTQSPTILSASPGEKVTMTCRASSSVNYMDWYQKKPGSSPKPWIYATSNLASGVPARFSGSGSGTSYSLTISRVEAEDAATYYCQQWSFNPPTFGGGTKLEIKRAAAHHHHHH

SEQ ID NO: 80 - protein, 505 aa, Artificial Sequence
  Description of Artificial Sequence: Synthetic polypeptide
MDFQVQIFSFLLISASVIMSRDIELTQSPTILSASPGEKVTMTCRASSSVNYMDWYQKKPGSSPKPWIYATSNLASGVPARFSGSGSGTSYSLTISRVEAEDAATYYCQQWSFNPPTFGGGTKLEIKRGGGGSGGGGSGGGGSMAQVKLQESGAELVKPGASVKMSCKASGYTFTSYNMHWVKQTPGQGLEWIGAIYPGNGDTSYNQKFKGKATLTADKSSSTAYMQLSSLTSEDSADYYCARSNYYGSSYWFFDVWGQGTTVTVSSAAAGDPAEPKSPDKTHTCPPCPAPELLGGPSVFLFPPKPKDTLMISRTPEVTCVVVDVSHEDPEVKFNWYVDGVEVHNAKTKPREEQYNSTYRVVSVLTVLHQDWLNGKEYKCKVSNKALPAPIEKTISKAKGQPREPQVYTLPPSREEMTKNQVSLTCLVKGFYPSDIAVEWESNGQPENNYKTTPPVLDSDGSFFLYSKLTVDKSRWQQGNVFSCSVMHEALHNHYTQKSLSLSPG

SEQ ID NO: 81 - protein, 276 aa, Artificial Sequence
  Description of Artificial Sequence: Synthetic polypeptide
MDFQVQIFSFLLISASVIMSRDIELTQSPTILSASPGEKVTMTCRASSSVNYMDWYQKKPGSSPKPWIYATSNLASGVPARFSGSGSGTSYSLTISRVEAEDAATYYCQQWSFNPPTFGGGTKLEIKRGGGGSGGGGSGGGGSMAQVKLQESGAELVKPGASVKMSCKASGYTFTSYNMHWVKQTPGQGLEWIGAIYPGNGDTSYNQKFKGKATLTADKSSSTAYMQLSSLTSEDSADYYCARSNYYGSSYWFFDVWGQGTTVTVSSAAAHHHHHH

SEQ ID NO: 82 - protein, 782 aa, Artificial Sequence
  Description of Artificial Sequence: Synthetic polypeptide
MPPPRLLFFLLFLTPMEVRPEEPLVVKVEEGDNAVLQCLKGTSDGPTQQLTWSRESPLKPFLKLSLGLPGLGIHMRPLAIWLFIFNVSQQMGGFYLCQPGPPSEKAWQPGWTVNVEGSGELFRWNVSDLGGLGCGLKNRSSEGPSSPSGKLMSPKLYVWAKDRPEIWEGEPPCLPPRDSLNQSLSQDLTMAPGSTLWLSCGVPPDSVSRGPLSWTHVHPKGPKSLLSLELKDDRPARDMWVMETGLLLPRATAQDAGKYYCHRGNLTMSFHLEITARPGGGGSGGGGSGGGGSGGGGSMAQVKLQESGAELVKPGASVKMSCKASGYTFTSYNMHWVKQTPGQGLEWIGAIYPGNGDTSYNQKFKGKATLTADKSSSTAYMQLSSLTSEDSADYYCARSNYYGSSYWFFDVWGQGTTVTVSSGGGGSGGGGSGGGGSDIELTQSPTILSASPGEKVTMTCRASSSVNYMDWYQKKPGSSPKPWIYATSNLASGVPARFSGSGSGTSYSLTISRVEAEDAATYYCQQWSFNPPTFGGGTKLEIKRAAAGDPAEPKSPDKTHTCPPCPAPELLGGPSVFLFPPKPKDTLMISRTPEVTCVVVDVSHEDPEVKFNWYVDGVEVHNAKTKPREEQYNSTYRVVSVLTVLHQDWLNGKEYKCKVSNKALPAPIEKTISKAKGQPREPQVYTLPPSREEMTKNQVSLTCLVKGFYPSDIAVEWESNGQPENNYKTTPPVLDSDGSFFLYSKLTVDKSRWQQGNVFSCSVMHEALHNHYTQKSLSLSPG

SEQ ID NO: 83 - protein, 553 aa, Artificial Sequence
  Description of Artificial Sequence: Synthetic polypeptide
MPPPRLLFFLLFLTPMEVRPEEPLVVKVEEGDNAVLQCLKGTSDGPTQQLTWSRESPLKPFLKLSLGLPGLGIHMRPLAIWLFIFNVSQQMGGFYLCQPGPPSEKAWQPGWTVNVEGSGELFRWNVSDLGGLGCGLKNRSSEGPSSPSGKLMSPKLYVWAKDRPEIWEGEPPCLPPRDSLNQSLSQDLTMAPGSTLWLSCGVPPDSVSRGPLSWTHVHPKGPKSLLSLELKDDRPARDMWVMETGLLLPRATAQDAGKYYCHRGNLTMSFHLEITARPGGGGSGGGGSGGGGSGGGGSMAQVKLQESGAELVKPGASVKMSCKASGYTFTSYNMHWVKQTPGQGLEWIGAIYPGNGDTSYNQKFKGKATLTADKSSSTAYMQLSSLTSEDSADYYCARSNYYGSSYWFFDVWGQGTTVTVSSGGGGSGGGGSGGGGSDIELTQSPTILSASPGEKVTMTCRASSSVNYMDWYQKKPGSSPKPWIYATSNLASGVPARFSGSGSGTSYSLTISRVEAEDAATYYCQQWSFNPPTFGGGTKLEIKRAAAHHHHHH

SEQ ID NO: 84 - protein, 782 aa, Artificial Sequence
  Description of Artificial Sequence: Synthetic polypeptide
MPPPRLLFFLLFLTPMEVRPEEPLVVKVEEGDNAVLQCLKGTSDGPTQQLTWSRESPLKPFLKLSLGLPGLGIHMRPLAIWLFIFNVSQQMGGFYLCQPGPPSEKAWQPGWTVNVEGSGELFRWNVSDLGGLGCGLKNRSSEGPSSPSGKLMSPKLYVWAKDRPEIWEGEPPCLPPRDSLNQSLSQDLTMAPGSTLWLSCGVPPDSVSRGPLSWTHVHPKGPKSLLSLELKDDRPARDMWVMETGLLLPRATAQDAGKYYCHRGNLTMSFHLEITARPGGGGSGGGGSGGGGSGGGGSDIELTQSPTILSASPGEKVTMTCRASSSVNYMDWYQKKPGSSPKPWIYATSNLASGVPARFSGSGSGTSYSLTISRVEAEDAATYYCQQWSFNPPTFGGGTKLEIKRGGGGSGGGGSGGGGSMAQVKLQESGAELVKPGASVKMSCKASGYTFTSYNMHWVKQTPGQGLEWIGAIYPGNGDTSYNQKFKGKATLTADKSSSTAYMQLSSLTSEDSADYYCARSNYYGSSYWFFDVWGQGTTVTVSSAAAGDPAEPKSPDKTHTCPPCPAPELLGGPSVFLFPPKPKDTLMISRTPEVTCVVVDVSHEDPEVKFNWYVDGVEVHNAKTKPREEQYNSTYRVVSVLTVLHQDWLNGKEYKCKVSNKALPAPIEKTISKAKGQPREPQVYTLPPSREEMTKNQVSLTCLVKGFYPSDIAVEWESNGQPENNYKTTPPVLDSDGSFFLYSKLTVDKSRWQQGNVFSCSVMHEALHNHYTQKSLSLSPG

SEQ ID NO: 85 - protein, 553 aa, Artificial Sequence
  Description of Artificial Sequence: Synthetic polypeptide
MPPPRLLFFLLFLTPMEVRPEEPLVVKVEEGDNAVLQCLKGTSDGPTQQLTWSRESPLKPFLKLSLGLPGLGIHMRPLAIWLFIFNVSQQMGGFYLCQPGPPSEKAWQPGWTVNVEGSGELFRWNVSDLGGLGCGLKNRSSEGPSSPSGKLMSPKLYVWAKDRPEIWEGEPPCLPPRDSLNQSLSQDLTMAPGSTLWLSCGVPPDSVSRGPLSWTHVHPKGPKSLLSLELKDDRPARDMWVMETGLLLPRATAQDAGKYYCHRGNLTMSFHLEITARPGGGGSGGGGSGGGGSGGGGSDIELTQSPTILSASPGEKVTMTCRASSSVNYMDWYQKKPGSSPKPWIYATSNLASGVPARFSGSGSGTSYSLTISRVEAEDAATYYCQQWSFNPPTFGGGTKLEIKRGGGGSGGGGSGGGGSMAQVKLQESGAELVKPGASVKMSCKASGYTFTSYNMHWVKQTPGQGLEWIGAIYPGNGDTSYNQKFKGKATLTADKSSSTAYMQLSSLTSEDSADYYCARSNYYGSSYWFFDVWGQGTTVTVSSAAAHHHHHH

SEQ ID NO: 86 - protein, 557 aa, Artificial Sequence
  Description of Artificial Sequence: Synthetic polypeptide
MPPPRLLFFLLFLTPMEVRPEEPLVVKVEEGDNAVLQCLKGTSDGPTQQLTWSRESPLKPFLKLSLGLPGLGIHMRPLAIWLFIFNVSQQMGGFYLCQPGPPSEKAWQPGWTVNVEGSGELFRWNVSDLGGLGCGLKNRSSEGPSSPSGKLMSPKLYVWAKDRPEIWEGEPPCLPPRDSLNQSLSQDLTMAPGSTLWLSCGVPPDSVSRGPLSWTHVHPKGPKSLLSLELKDDRPARDMWVMETGLLLPRATAQDAGKYYCHRGNLTMSFHLEITARPGGGGSGGGGSGGGGSGGGGSQVQLVQSGAEDKKPGESVKISCKASGYTFTNYGMNWVRQAPGQGLKWMGWINTYTGESTYADDFKGRFAFSLDTSASTAYLQLSSLRGEDTAVYFCARFAIKGDYWGQGTTVTVSSASTGGGGSGGGGSGGGGSGGGGSDIVMTQSPLSLEVSPGEPASISCRSTKSLLHSDGITYLYWYLQKPGQSPQLLIYQLSNLASGVPDRFSSSGSGTDFTLKISRVEAEDEGTYYCAQNLEIPRTFGQGTKLEIKRTHHHHHH

SEQ ID NO: 87 - protein, 552 aa, Artificial Sequence
  Description of Artificial Sequence: Synthetic polypeptide
MPPPRLLFFLLFLTPMEVRPEEPLVVKVEEGDNAVLQCLKGTSDGPTQQLTWSRESPLKPFLKLSLGLPGLGIHMRPLAIWLFIFNVSQQMGGFYLCQPGPPSEKAWQPGWTVNVEGSGELFRWNVSDLGGLGCGLKNRSSEGPSSPSGKLMSPKLYVWAKDRPEIWEGEPPCLPPRDSLNQSLSQDLTMAPGSTLWLSCGVPPDSVSRGPLSWTHVHPKGPKSLLSLELKDDRPARDMWVMETGLLLPRATAQDAGKYYCHRGNLTMSFHLEITARPGGGGSGGGGSGGGGSGGGGSQVQLVQSGAEDVKPDASVKLSCKASGYTFTDYYMHWVRQAPGQGLEWMGRVNPNRRGTTYNQKFEGRVTMTTDTSTSTAYMQLSSLRGEDTAVYYCARANWLDYWGQGTTVTVSSASTGGGGSGGGGSGGGGSGGGGSDIQMTQSPSSLEASVGDRVTITCSVSSSVSSIYLHWYQQKPGKSPKLLIYSTSNLASGVPDRFSGSGSGTDFTLTISSLQAEDEGTYYCQVYSGYPLTFGGGTKLEIKRTHHHHHH

SEQ ID NO: 88 - protein, 555 aa, Artificial Sequence
  Description of Artificial Sequence: Synthetic polypeptide
MPPPRLLFFLLFLTPMEVRPEEPLVVKVEEGDNAVLQCLKGTSDGPTQQLTWSRESPLKPFLKLSLGLPGLGIHMRPLAIWLFIFNVSQQMGGFYLCQPGPPSEKAWQPGWTVNVEGSGELFRWNVSDLGGLGCGLKNRSSEGPSSPSGKLMSPKLYVWAKDRPEIWEGEPPCLPPRDSLNQSLSQDLTMAPGSTLWLSCGVPPDSVSRGPLSWTHVHPKGPKSLLSLELKDDRPARDMWVMETGLLLPRATAQDAGKYYCHRGNLTMSFHLEITARPGGGGSGGGGSGGGGSGGGGSQVQLQESGPGDVKPSETLSLTCTVSGGSVSSGDYYWTWIRQSPGKGLEWIGHIYYSGNTNYNPSLKSRLTISIDTSKTTFSLQLSSVTGEDTAIYYCVRDRVTGAFDIWGQGTTVTVSSASTGGGGSGGGGSGGGGSGGGGSDIQMTQSPSSLEASVGDRVTITCQASQDISNYLNWYQQKPGKSPKLLIYDASNLETGVPDRFSGSGSGTDFTFTISSLQAEDEGTYFCQHFDHLPLAFGGGTKLEIKRTHHHHHH

SEQ ID NO: 89 - protein, 287 aa, Artificial Sequence
  Description of Artificial Sequence: Synthetic polypeptide
METDTLLLWVLLLWVPGSTGDIVLTQSPPSLAMSLGKRATISCRASESVTILGSHLIHWYQQKPGQPPTLLIQLASNVQTGVPARFSGSGSRTDFTLTIDPVEEDDVAVYYCLQSRTIPRTFGGGTKLEIKGSTSGSGKPGSGEGSTKGQIQLVQSGPELKKPGETVKISCKASGYTFTDYSINWVKRAPGKGLKWMGWINTETREPAYAYDFRGRFAFSLETSASTAYLQINNLKYEDTATYFCALDYSYAMDYWGQGTSVTVSSGGGGSGGGGSGGGGSHHHHHH

SEQ ID NO: 90 - protein, 286 aa, Artificial Sequence
  Description of Artificial Sequence: Synthetic polypeptide
MEFGLSWVFLVALFRGVQCQIQLVQSGPELKKPGETVKISCKASGYTFTDYSINWVKRAPGKGLKWMGWINTETREPAYAYDFRGRFAFSLETSASTAYLQINNLKYEDTATYFCALDYSYAMDYWGQGTSVTVSSGSTSGSGKPGSGEGSTKGDIVLTQSPPSLAMSLGKRATISCRASESVTILGSHLIHWYQQKPGQPPTLLIQLASNVQTGVPARFSGSGSRTDFTLTIDPVEEDDVAVYYCLQSRTIPRTFGGGTKLEIKGGGGSGGGGSGGGGSHHHHHH

SEQ ID NO: 91 - protein, 565 aa, Artificial Sequence
  Description of Artificial Sequence: Synthetic polypeptide
MPPPRLLFFLLFLTPMEVRPEEPLVVKVEEGDNAVLQCLKGTSDGPTQQLTWSRESPLKPFLKLSLGLPGLGIHMRPLAIWLFIFNVSQQMGGFYLCQPGPPSEKAWQPGWTVNVEGSGELFRWNVSDLGGLGCGLKNRSSEGPSSPSGKLMSPKLYVWAKDRPEIWEGEPPCLPPRDSLNQSLSQDLTMAPGSTLWLSCGVPPDSVSRGPLSWTHVHPKGPKSLLSLELKDDRPARDMWVMETGLLLPRATAQDAGKYYCHRGNLTMSFHLEITARPGGGGSGGGGSGGGGSGGGGSDIVLTQSPPSLAMSLGKRATISCRASESVTILGSHLIHWYQQKPGQPPTLLIQLASNVQTGVPARFSGSGSRTDFTLTIDPVEEDDVAVYYCLQSRTIPRTFGGGTKLEIKGSTSGSGKPGSGEGSTKGQIQLVQSGPELKKPGETVKISCKASGYTFTDYSINWVKRAPGKGLKWMGWINTETREPAYAYDFRGRFAFSLETSASTAYLQINNLKYEDTATYFCALDYSYAMDYWGQGTSVTVSSGGGGSGGGGSGGGGSHHHHHH

SEQ ID NO: 92 - protein, 565 aa, Artificial Sequence
  Description of Artificial Sequence: Synthetic polypeptide
MPPPRLLFFLLFLTPMEVRPEEPLVVKVEEGDNAVLQCLKGTSDGPTQQLTWSRESPLKPFLKLSLGLPGLGIHMRPLAIWLFIFNVSQQMGGFYLCQPGPPSEKAWQPGWTVNVEGSGELFRWNVSDLGGLGCGLKNRSSEGPSSPSGKLMSPKLYVWAKDRPEIWEGEPPCLPPRDSLNQSLSQDLTMAPGSTLWLSCGVPPDSVSRGPLSWTHVHPKGPKSLLSLELKDDRPARDMWVMETGLLLPRATAQDAGKYYCHRGNLTMSFHLEITARPGGGGSGGGGSGGGGSGGGGSQIQLVQSGPELKKPGETVKISCKASGYTFTDYSINWVKRAPGKGLKWMGWINTETREPAYAYDFRGRFAFSLETSASTAYLQINNLKYEDTATYFCALDYSYAMDYWGQGTSVTVSSGSTSGSGKPGSGEGSTKGDIVLTQSPPSLAMSLGKRATISCRASESVTILGSHLIHWYQQKPGQPPTLLIQLASNVQTGVPARFSGSGSRTDFTLTIDPVEEDDVAVYYCLQSRTIPRTFGGGTKLEIKGGGGSGGGGSGGGGSHHHHHH

SEQ ID NO: 93 - protein, 771 aa, Artificial Sequence
  Description of Artificial Sequence: Synthetic polypeptide
MPPPRLLFFLLFLTPMEVRPEEPLVVKVEEGDNAVLQCLKGTSDGPTQQLTWSRESPLKPFLKLSLGLPGLGIHMRPLAIWLFIFNVSQQMGGFYLCQPGPPSEKAWQPGWTVNVEGSGELFRWNVSDLGGLGCGLKNRSSEGPSSPSGKLMSPKLYVWAKDRPEIWEGEPPCLPPRDSLNQSLSQDLTMAPGSTLWLSCGVPPDSVSRGPLSWTHVHPKGPKSLLSLELKDDRPARDMWVMETGLLLPRATAQDAGKYYCHRGNLTMSFHLEITARPDKTHTCPPCPAPELLGGPSVFLFPPKPKDTLMISRTPEVTCVVVDVSHEDPEVKFNWYVDGVEVHNAKTKPREEQYNSTYRVVSVLTVLHQDWLNGKEYKCKVSNKALPAPIEKTISKAKGQPREPQVYTLPPSREEMTKNQVSLTCLVKGFYPSDIAVEWESNGQPENNYKTTPPVLDSDGSFFLYSKLTVDKSRWQQGNVFSCSVMHEALHNHYTQKSLSLSPGGGGGSGGGGSGGGGSGGGGSEVQLVESGGGLVQPGGSLRLSCAASGFNIKDTYIHWVRQAPGKGLEWVARIYPTNGYTRYADSVKGRFTISADTSKNTAYLQMNSLRAEDTAVYYCSRWGGDGFYAMDYWGQGTLVTVSSASTGGGGSGGGGSGGGGSDIQMTQSPSSLSASVGDRVTITCRASQDVNTAVAWYQQKPGKAPKLLIYSASFLYSGVPSRFSGSRSGTDFTLTISSLQPEDFATYYCQQHYTTPPTFGQGTKVEIKRT

SEQ ID NO: 94 - protein, 827 aa, Artificial Sequence
  Description of Artificial Sequence: Synthetic polypeptide
MPPPRLLFFLLFLTPMEVRPEEPLVVKVEEGDNAVLQCLKGTSDGPTQQLTWSRESPLKPFLKLSLGLPGLGIHMRPLAIWLFIFNVSQQMGGFYLCQPGPPSEKAWQPGWTVNVEGSGELFRWNVSDLGGLGCGLKNRSSEGPSSPSGKLMSPKLYVWAKDRPEIWEGEPPCLPPRDSLNQSLSQDLTMAPGSTLWLSCGVPPDSVSRGPLSWTHVHPKGPKSLLSLELKDDRPARDMWVMETGLLLPRATAQDAGKYYCHRGNLTMSFHLEITARPGGGGSGGGGSGGGGSGGGGSEVQLVESGGGLVQPGGSLRLSCAASGFNIKDTYIHWVRQAPGKGLEWVARIYPTNGYTRYADSVKGRFTISADTSKNTAYLQMNSLRAEDTAVYYCSRWGGDGFYAMDYWGQGTLVTVSSASTGGGGSGGGGSGGGGSDIQMTQSPSSLSASVGDRVTITCRASQDVNTAVAWYQQKPGKAPKLLIYSASFLYSGVPSRFSGSRSGTDFTLTISSLQPEDFATYYCQQHYTTPPTFGQGTKVEIKRTGGGGSGGGGSGGGGSGGGGSQVQLQESGPGDVKPSETLSLTCTVSGGSVSSGDYYWTWIRQSPGKGLEWIGHIYYSGNTNYNPSLKSRLTISIDTSKTTFSLQLSSVTGEDTAIYYCVRDRVTGAFDIWGQGTTVTVSSASTGGGGSGGGGSGGGGSGGGGSDIQMTQSPSSLEASVGDRVTITCQASQDISNYLNWYQQKPGKSPKLLIYDASNLETGVPDRFSGSGSGTDFTFTISSLQAEDEGTYFCQHFDHLPLAFGGGTKLEIKRTGGGGSHHHHHH

SEQ ID NO: 95 - protein, 827 aa, Artificial Sequence
  Description of Artificial Sequence: Synthetic polypeptide
MPPPRLLFFLLFLTPMEVRPEEPLVVKVEEGDNAVLQCLKGTSDGPTQQLTWSRESPLKPFLKLSLGLPGLGIHMRPLAIWLFIFNVSQQMGGFYLCQPGPPSEKAWQPGWTVNVEGSGELFRWNVSDLGGLGCGLKNRSSEGPSSPSGKLMSPKLYVWAKDRPEIWEGEPPCLPPRDSLNQSLSQDLTMAPGSTLWLSCGVPPDSVSRGPLSWTHVHPKGPKSLLSLELKDDRPARDMWVMETGLLLPRATAQDAGKYYCHRGNLTMSFHLEITARPGGGGSGGGGSGGGGSGGGGSEVQLVESGGGLVQPGGSLRLSCAASGFNIKDTYIHWVRQAPGKGLEWVARIYPTNGYTRYADSVKGRFTISADTSKNTAYLQMNSLRAEDTAVYYCSRWGGDGFYAMDYWGQGTLVTVSSASTGGGGSGGGGSGGGGSDIQMTQSPSSLSASVGDRVTITCRASQDVNTAVAWYQQKPGKAPKLLIYSASFLYSGVPSRFSGSRSGTDFTLTISSLQPEDFATYYCQQHYTTPPTFGQGTKVEIKRTGGGGSGGGGSGGGGSGGGGSDIQMTQSPSSLEASVGDRVTITCQASQDISNYLNWYQQKPGKSPKLLIYDASNLETGVPDRFSGSGSGTDFTFTISSLQAEDEGTYFCQHFDHLPLAFGGGTKLEIKRTGGGGSGGGGSGGGGSGGGGSQVQLQESGPGDVKPSETLSLTCTVSGGSVSSGDYYWTWIRQSPGKGLEWIGHIYYSGNTNYNPSLKSRLTISIDTSKTTFSLQLSSVTGEDTAIYYCVRDRVTGAFDIWGQGTTVTVSSASTGGGGSHHHHHH

SEQ ID NO: 96 - protein, 548 aa, Artificial Sequence
  Description of Artificial Sequence: Synthetic polypeptide
MEFGLSWVFLVALFRGVQCEVQLVESGGGLVQPGGSLRLSCAASGFNIKDTYIHWVRQAPGKGLEWVARIYPTNGYTRYADSVKGRFTISADTSKNTAYLQMNSLRAEDTAVYYCSRWGGDGFYAMDYWGQGTLVTVSSASTGGGGSGGGGSGGGGSDIQMTQSPSSLSASVGDRVTITCRASQDVNTAVAWYQQKPGKAPKLLIYSASFLYSGVPSRFSGSRSGTDFTLTISSLQPEDFATYYCQQHYTTPPTFGQGTKVEIKRTGGGGSGGGGSGGGGSGGGGSQVQLQESGPGDVKPSETLSLTCTVSGGSVSSGDYYWTWIRQSPGKGLEWIGHIYYSGNTNYNPSLKSRLTISIDTSKTTFSLQLSSVTGEDTAIYYCVRDRVTGAFDIWGQGTTVTVSSASTGGGGSGGGGSGGGGSGGGGSDIQMTQSPSSLEASVGDRVTITCQASQDISNYLNWYQQKPGKSPKLLIYDASNLETGVPDRFSGSGSGTDFTFTISSLQAEDEGTYFCQHFDHLPLAFGGGTKLEIKRTGGGGSHHHHHH

SEQ ID NO: 97 - protein, 548 aa, Artificial Sequence
  Description of Artificial Sequence: Synthetic polypeptide
MEFGLSWVFLVALFRGVQCEVQLVESGGGLVQPGGSLRLSCAASGFNIKDTYIHWVRQAPGKGLEWVARIYPTNGYTRYADSVKGRFTISADTSKNTAYLQMNSLRAEDTAVYYCSRWGGDGFYAMDYWGQGTLVTVSSASTGGGGSGGGGSGGGGSDIQMTQSPSSLSASVGDRVTITCRASQDVNTAVAWYQQKPGKAPKLLIYSASFLYSGVPSRFSGSRSGTDFTLTISSLQPEDFATYYCQQHYTTPPTFGQGTKVEIKRTGGGGSGGGGSGGGGSGGGGSDIQMTQSPSSLEASVGDRVTITCQASQDISNYLNWYQQKPGKSPKLLIYDASNLETGVPDRFSGSGSGTDFTFTISSLQAEDEGTYFCQHFDHLPLAFGGGTKLEIKRTGGGGSGGGGSGGGGSGGGGSQVQLQESGPGDVKPSETLSLTCTVSGGSVSSGDYYWTWIRQSPGKGLEWIGHIYYSGNTNYNPSLKSRLTISIDTSKTTFSLQLSSVTGEDTAIYYCVRDRVTGAFDIWGQGTTVTVSSASTGGGGSHHHHHH

SEQ ID NO: 98 - protein, 551 aa, Artificial Sequence; identical to SEQ ID NO: 73
  Description of Artificial Sequence: Synthetic polypeptide

SEQ ID NO: 99 - protein, 505 aa, Artificial Sequence; identical to SEQ ID NO: 78
  Description of Artificial Sequence: Synthetic polypeptide

SEQ ID NO: 100 - protein, 276 aa, Artificial Sequence; identical to SEQ ID NO: 79
  Description of Artificial Sequence: Synthetic polypeptide

SEQ ID NO: 101 - protein, 505 aa, Artificial Sequence; identical to SEQ ID NO: 80
  Description of Artificial Sequence: Synthetic polypeptide

SEQ ID NO: 102 - protein, 276 aa, Artificial Sequence; identical to SEQ ID NO: 81
  Description of Artificial Sequence: Synthetic polypeptide

SEQ ID NO: 103 - protein, 492 aa, Artificial Sequence
  Description of Artificial Sequence: Synthetic polypeptide
MEFGLSWVFLVALFRGVQCEVQLVESGGGLVQPGGSLRLSCAASGFNIKDTYIHWVRQAPGKGLEWVARIYPTNGYTRYADSVKGRFTISADTSKNTAYLQMNSLRAEDTAVYYCSRWGGDGFYAMDYWGQGTLVTVSSASTGGGGSGGGGSGGGGSDIQMTQSPSSLSASVGDRVTITCRASQDVNTAVAWYQQKPGKAPKLLIYSASFLYSGVPSRFSGSRSGTDFTLTISSLQPEDFATYYCQQHYTTPPTFGQGTKVEIKRTDKTHTCPPCPAPELLGGPSVFLFPPKPKDTLMISRTPEVTCVVVDVSHEDPEVKFNWYVDGVEVHNAKTKPREEQYNSTYRVVSVLTVLHQDWLNGKEYKCKVSNKALPAPIEKTISKAKGQPREPQVYTLPPSREEMTKNQVSLTCLVKGFYPSDIAVEWESNGQPENNYKTTPPVLDSDGSFFLYSKLTVDKSRWQQGNVFSCSVMHEALHNHYTQKSLSLSPG

SEQ ID NO: 104 - protein, 797 aa, Artificial Sequence
  Description of Artificial Sequence: Synthetic polypeptide
MPPPRLLFFLLFLTPMEVRPEEPLVVKVEEGDNAVLQCLKGTSDGPTQQLTWSRESPLKPFLKLSLGLPGLGIHMRPLAIWLFIFNVSQQMGGFYLCQPGPPSEKAWQPGWTVNVEGSGELFRWNVSDLGGLGCGLKNRSSEGPSSPSGKLMSPKLYVWAKDRPEIWEGEPPCLPPRDSLNQSLSQDLTMAPGSTLWLSCGVPPDSVSRGPLSWTHVHPKGPKSLLSLELKDDRPARDMWVMETGLLLPRATAQDAGKYYCHRGNLTMSFHLEITARPGGGGSGGGGSGGGGSGGGGSGGGGSGGGGSGGGGSMAQVKLQESGAELVKPGASVKMSCKASGYTFTSYNMHWVKQTPGQGLEWIGAIYPGNGDTSYNQKFKGKATLTADKSSSTAYMQLSSLTSEDSADYYCARSNYYGSSYWFFDVWGQGTTVTVSSGGGGSGGGGSGGGGSDIELTQSPTILSASPGEKVTMTCRASSSVNYMDWYQKKPGSSPKPWIYATSNLASGVPARFSGSGSGTSYSLTISRVEAEDAATYYCQQWSFNPPTFGGGTKLEIKRAAAGDPAEPKSPDKTHTCPPCPAPELLGGPSVFLFPPKPKDTLMISRTPEVTCVVVDVSHEDPEVKFNWYVDGVEVHNAKTKPREEQYNSTYRVVSVLTVLHQDWLNGKEYKCKVSNKALPAPIEKTISKAKGQPREPQVYTLPPSREEMTKNQVSLTCLVKGFYPSDIAVEWESNGQPENNYKTTPPVLDSDGSFFLYSKLTVDKSRWQQGNVFSCSVMHEALHNHYTQKSLSLSPG

SEQ ID NO: 105 - protein, 568 aa, Artificial Sequence
  Description of Artificial Sequence: Synthetic polypeptide
MPPPRLLFFLLFLTPMEVRPEEPLVVKVEEGDNAVLQCLKGTSDGPTQQLTWSRESPLKPFLKLSLGLPGLGIHMRPLAIWLFIFNVSQQMGGFYLCQPGPPSEKAWQPGWTVNVEGSGELFRWNVSDLGGLGCGLKNRSSEGPSSPSGKLMSPKLYVWAKDRPEIWEGEPPCLPPRDSLNQSLSQDLTMAPGSTLWLSCGVPPDSVSRGPLSWTHVHPKGPKSLLSLELKDDRPARDMWVMETGLLLPRATAQDAGKYYCHRGNLTMSFHLEITARPGGGGSGGGGSGGGGSGGGGSGGGGSGGGGSGGGGSMAQVKLQESGAELVKPGASVKMSCKASGYTFTSYNMHWVKQTPGQGLEWIGAIYPGNGDTSYNQKFKGKATLTADKSSSTAYMQLSSLTSEDSADYYCARSNYYGSSYWFFDVWGQGTTVTVSSGGGGSGGGGSGGGGSDIELTQSPTILSASPGEKVTMTCRASSSVNYMDWYQKKPGSSPKPWIYATSNLASGVPARFSGSGSGTSYSLTISRVEAEDAATYYCQQWSFNPPTFGGGTKLEIKRAAAHHHHHH

SEQ ID NO: 106 - protein, 779 aa, Artificial Sequence
  Description of Artificial Sequence: Synthetic polypeptide
MPPPRLLFFLLFLTPMEVRPEEPLVVKVEEGDNAVLQCLKGTSDGPTQQLTWSRESPLKPFLKLSLGLPGLGIHMRPLAIWLFIFNVSQQMGGFYLCQPGPPSEKAWQPGWTVNVEGSGELFRWNVSDLGGLGCGLKNRSSEGPSSPSGKLMSPKLYVWAKDRPEIWEGEPPCLPPRDSLNQSLSQDLTMAPGSTLWLSCGVPPDSVSRGPLSWTHVHPKGPKSLLSLELKDDRPARDMWVMETGLLLPRATAQDAGKYYCHRGNLTMSFHLEITARPDPAEPKSPDKTHTCPPCPAPELLGGPSVFLFPPKPKDTLMISRTPEVTCVVVDVSHEDPEVKFNWYVDGVEVHNAKTKPREEQYNSTYRVVSVLTVLHQDWLNGKEYKCKVSNKALPAPIEKTISKAKGQPREPQVYTLPPSREEMTKNQVSLTCLVKGFYPSDIAVEWESNGQPENNYKTTPPVLDSDGSFFLYSKLTVDKSRWQQGNVFSCSVMHEALHNHYTQKSLSLSPGGGGGSGGGGSGGGGSGGGGSMAQVKLQESGAELVKPGASVKMSCKASGYTFTSYNMHWVKQTPGQGLEWIGAIYPGNGDTSYNQKFKGKATLTADKSSSTAYMQLSSLTSEDSADYYCARSNYYGSSYWFFDVWGQGTTVTVSSGGGGSGGGGSGGGGSDIELTQSPTILSASPGEKVTMTCRASSSVNYMDWYQKKPGSSPKPWIYATSNLASGVPARFSGSGSGTSYSLTISRVEAEDAATYYCQQWSFNPPTFGGGTKLEIKRA

SEQ ID NO: 107 - protein, 783 aa, Artificial Sequence
  Description of Artificial Sequence: Synthetic polypeptide
MDFQVQIFSFLLISASVIMSRMAQVKLQESGAELVKPGASVKMSCKASGYTFTSYNMHWVKQTPGQGLEWIGAIYPGNGDTSYNQKFKGKATLTADKSSSTAYMQLSSLTSEDSADYYCARSNYYGSSYWFFDVWGQGTTVTVSSGGGGSGGGGSGGGGSDIELTQSPTILSASPGEKVTMTCRASSSVNYMDWYQKKPGSSPKPWIYATSNLASGVPARFSGSGSGTSYSLTISRVEAEDAATYYCQQWSFNPPTFGGGTKLEIKRAAAGGGGSGGGGSGGGGSGGGGSPEEPLVVKVEEGDNAVLQCLKGTSDGPTQQLTWSRESPLKPFLKLSLGLPGLGIHMRPLAIWLFIFNVSQQMGGFYLCQPGPPSEKAWQPGWTVNVEGSGELFRWNVSDLGGLGCGLKNRSSEGPSSPSGKLMSPKLYVWAKDRPEIWEGEPPCLPPRDSLNQSLSQDLTMAPGSTLWLSCGVPPDSVSRGPLSWTHVHPKGPKSLLSLELKDDRPARDMWVMETGLLLPRATAQDAGKYYCHRGNLTMSFHLEITARPDPAEPKSPDKTHTCPPCPAPELLGGPSVFLFPPKPKDTLMISRTPEVTCVVVDVSHEDPEVKFNWYVDGVEVHNAKTKPREEQYNSTYRVVSVLTVLHQDWLNGKEYKCKVSNKALPAPIEKTISKAKGQPREPQVYTLPPSREEMTKNQVSLTCLVKGFYPSDIAVEWESNGQPENNYKTTPPVLDSDGSFFLYSKLTVDKSRWQQGNVFSCSVMHEALHNHYTQKSLSLSPG

SEQ ID NO: 108 - protein, 1106 aa, Artificial Sequence
  Description of Artificial Sequence: Synthetic polypeptide
MLRLLLALNLFPSIQVTGDIQMTQTTSSLSASLGDRVTISCRASQDISKYLNWYQQKPDGTVKLLIYHTSRLHSGVPSRFSGSGSGTDYSLTISNLEQEDIATYFCQQGNTLPYTFGGGTKLEITGGGGSGGGGSGGGGSGGGGSEVKLQESGPGLVAPSQSLSVTCTVSGVSLPDYGVSWIRQPPRKGLEWLGVIWGSETTYYNSALKSRLTIIKDNSKSQVFLKMNSLQTDDTAIYYCAKHYYYGGSYAMDYWGQGTSVTVSSDYKDDDDKIEVMYPPPYLDNEKSNGTIIHVKGKHLCPSPLFPGPSKPFWVLVVVGGVLACYSLLVTVAFIIFWVRSKRSRLLHSDYMNMTPRRPGPTRKHYQPYAPPRDFAAYRSKRGRKKLLYIFKQPFMRPVQTTQEEDGCSCRFPEEEEGGCELRVKFSRSADAPAYQQGQNQLYNELNLGRREEYDVLDKRRGRDPEMGGKPQRRKNPQEGLYNELQKDKMAEAYSEIGMKGERRRGKGHDGLYQGLSTATKDTYDALHMQALPPREGRGSLLTCGDVEENPGPMPPPRLLFFLLFLTPMEVRPEEPLVVKVEEGDNAVLQCLKGTSDGPTQQLTWSRESPLKPFLKLSLGLPGLGIHMRPLAIWLFIFNVSQQMGGFYLCQPGPPSEKAWQPGWTVNVEGSGELFRWNVSDLGGLGCGLKNRSSEGPSSPSGKLMSPKLYVWAKDRPEIWEGEPPCLPPRDSLNQSLSQDLTMAPGSTLWLSCGVPPDSVSRGPLSWTHVHPKGPKSLLSLELKDDRPARDMWVMETGLLLPRATAQDAGKYYCHRGNLTMSFHLEITARPGGGGSGGGGSGGGGSGGGGSEVQLVESGGGLVQPGGSLRLSCAASGFNIKDTYIHWVRQAPGKGLEWVARIYPTNGYTRYADSVKGRFTISADTSKNTAYLQMNSLRAEDTAVYYCSRWGGDGFYAMDYWGQGTLVTVSSASTGGGGSGGGGSGGGGSDIQMTQSPSSLSASVGDRVTITCRASQDVNTAVAWYQQKPGKAPKLLIYSASFLYSGVPSRFSGSRSGTDFTLTISSLQPEDFATYYCQQHYTTPPTFGQGTKVEIKRTSRHHHHHH

SEQ ID NO: 109 - protein, 1106 aa, Artificial Sequence
  Description of Artificial Sequence: Synthetic polypeptide
MPPPRLLFFLLFLTPMEVRPEEPLVVKVEEGDNAVLQCLKGTSDGPTQQLTWSRESPLKPFLKLSLGLPGLGIHMRPLAIWLFIFNVSQQMGGFYLCQPGPPSEKAWQPGWTVNVEGSGELFRWNVSDLGGLGCGLKNRSSEGPSSPSGKLMSPKLYVWAKDRPEIWEGEPPCLPPRDSLNQSLSQDLTMAPGSTLWLSCGVPPDSVSRGPLSWTHVHPKGPKSLLSLELKDDRPARDMWVMETGLLLPRATAQDAGKYYCHRGNLTMSFHLEITARPGGGGSGGGGSGGGGSGGGGSEVQLVESGGGLVQPGGSLRLSCAASGFNIKDTYIHWVRQAPGKGLEWVARIYPTNGYTRYADSVKGRFTISADTSKNTAYLQMNSLRAEDTAVYYCSRWGGDGFYAMDYWGQGTLVTVSSASTGGGGSGGGGSGGGGSDIQMTQSPSSLSASVGDRVTITCRASQDVNTAVAWYQQKPGKAPKLLIYSASFLYSGVPSRFSGSRSGTDFTLTISSLQPEDFATYYCQQHYTTPPTFGQGTKVEIKRTSRHHHHHHEGRGSLLTCGDVEENPGPMLRLLLALNLFPSIQVTGDIQMTQTTSSLSASLGDRVTISCRASQDISKYLNWYQQKPDGTVKLLIYHTSRLHSGVPSRFSGSGSGTDYSLTISNLEQEDIATYFCQQGNTLPYTFGGGTKLEITGGGGSGGGGSGGGGSGGGGSEVKLQESGPGLVAPSQSLSVTCTVSGVSLPDYGVSWIRQPPRKGLEWLGVIWGSETTYYNSALKSRLTIIKDNSKSQVFLKMNSLQTDDTAIYYCAKHYYYGGSYAMDYWGQGTSVTVSSDYKDDDDKIEVMYPPPYLDNEKSNGTIIHVKGKHLCPSPLFPGPSKPFWVLVVVGGVLACYSLLVTVAFIIFWVRSKRSRLLHSDYMNMTPRRPGPTRKHYQPYAPPRDFAAYRSKRGRKKLLYIFKQPFMRPVQTTQEEDGCSCRFPEEEEGGCELRVKFSRSADAPAYQQGQNQLYNELNLGRREEYDVLDKRRGRDPEMGGKPQRRKNPQEGLYNELQKDKMAEAYSEIGMKGERRRGKGHDGLYQGLSTATKDTYDALHMQALPPR

SEQ ID NO: 110 - protein, 551 aa, Artificial Sequence; identical to SEQ ID NO: 73
  Description of Artificial Sequence: Synthetic polypeptide

SEQ ID NO: 111 - protein, 551 aa, Artificial Sequence; identical to SEQ ID NO: 73
  Description of Artificial Sequence: Synthetic polypeptide

SEQ ID NO: 112 - protein, 291 aa, Artificial Sequence
  Description of Artificial Sequence: Synthetic polypeptide
MPPPRLLFFLLFLTPMEVRPEEPLVVKVEEGDNAVLQCLKGTSDGPTQQLTWSRESPLKPFLKLSLGLPGLGIHMRPLAIWLFIFNVSQQMGGFYLCQPGPPSEKAWQPGWTVNVEGSGELFRWNVSDLGGLGCGLKNRSSEGPSSPSGKLMSPKLYVWAKDRPEIWEGEPPCLPPRDSLNQSLSQDLTMAPGSTLWLSCGVPPDSVSRGPLSWTHVHPKGPKSLLSLELKDDRPARDMWVMETGLLLPRATAQDAGKYYCHRGNLTMSFHLEITARPVLWHWLLRTGGWK

SEQ ID NO: 113 - protein, 553 aa, Artificial Sequence
  Description of Artificial Sequence: Synthetic polypeptide
MPPPRLLFFLLFLTPMEVRPEEPLVVKVEEGDNAVLQCLKGTSDGPTQQLTWSRESPLKPFLKLSLGLPGLGIHMRPLAIWLFIFNVSQQMGGFYLCQPGPPSEKAWQPGWTVNVEGSGELFRWNVSDLGGLGCGLKNRSSEGPSSPSGKLMSPKLYVWAKDRPEIWEGEPPCLPPRDSLNQSLSQDLTMAPGSTLWLSCGVPPDSVSRGPLSWTHVHPKGPKSLLSLELKDDRPARDMWVMETGLLLPRATAQDAGKYYCHRGNLTMSFHLEITARPGGGGSGGGGSGGGGSGGGGSEVQLVESGGGLVQPGGSLRLSCAASGFNIKDTYIHWVRQAPGKGLEWVARIYPTNGYTRYADSVKGRFTISADTSKNTAYLQMNSLRAEDTAVYYCSRWGGDGFYAMDYWGQGTLVTVSSASTGGGGSGGGGSGGGGSDIQMTQSPSSLSASVGDRVTITCRASQDVNTAVAWYQQKPGKAPKLLIYSASFLYSGVPSRFSGSRSGTDFTLTISSLQPEDFATYYCQQHYTTPPTFGQGTKVEIKRTSRHHHHHH

SEQ ID NO: 114 - protein, 557 aa, Artificial Sequence; identical to SEQ ID NO: 86
  Description of Artificial Sequence: Synthetic polypeptide

SEQ ID NO: 115 - protein, 552 aa, Artificial Sequence; identical to SEQ ID NO: 87
  Description of Artificial Sequence: Synthetic polypeptide

SEQ ID NO: 116 - protein, 555 aa, Artificial Sequence; identical to SEQ ID NO: 88
  Description of Artificial Sequence: Synthetic polypeptide

SEQ ID NO: 117 - protein, 535 aa, Artificial Sequence; identical to SEQ ID NO: 71
  Description of Artificial Sequence: Synthetic polypeptide

SEQ ID NO: 118 - protein, 527 aa, Artificial Sequence
  Description of Artificial Sequence: Synthetic polypeptide
MLRLLLALNLFPSIQVTGDIQMTQTTSSLSASLGDRVTISCRASQDISKYLNWYQQKPDGTVKLLIYHTSRLHSGVPSRFSGSGSGTDYSLTISNLEQEDIATYFCQQGNTLPYTFGGGTKLEITGGGGSGGGGSGGGGSGGGGSEVKLQESGPGLVAPSQSLSVTCTVSGVSLPDYGVSWIRQPPRKGLEWLGVIWGSETTYYNSALKSRLTIIKDNSKSQVFLKMNSLQTDDTAIYYCAKHYYYGGSYAMDYWGQGTSVTVSSIEVMYPPPYLDNEKSNGTIIHVKGKHLCPSPLFPGPSKPFWVLVVVGGVLACYSLLVTVAFIIFWVRSKRSRLLHSDYMNMTPRRPGPTRKHYQPYAPPRDFAAYRSKRGRKKLLYIFKQPFMRPVQTTQEEDGCSCRFPEEEEGGCELRVKFSRSADAPAYQQGQNQLYNELNLGRREEYDVLDKRRGRDPEMGGKPQRRKNPQEGLYNELQKDKMAEAYSEIGMKGERRRGKGHDGLYQGLSTATKDTYDALHMQALPPR

SEQ ID NO: 119 - protein, 466 aa, Artificial Sequence
  Description of Artificial Sequence: Synthetic polypeptide
MEKDTLLLWVLLLWVPGSTGEVKLVESGGGLVQPGGSLKLSCAASGFDFSRYWMSWVRQAPGKGLEWIGEINLDSSTINYTPSLKDKFIISRDNAKNTLYLQMSKVRSEDTALYYCARRYDAMDYWGQGTSVTVSSAKTTAPSVYPLAPVCGDTTGSSVTLGCLVKGYFPEPVTLTWNSGSLSSGVHTFPAVLQSDLYTLSSSVTVTSSTWPSQSITCNVAHPASSTKVDKKIEPRGPTIKPCPPCKCPAPNLLGGPSVFIFPPKIKDVLMISLSPIVTCVVVDVSEDDPDVQISWFVNNVEVHTAQTQTHREDYNSTLRVVSALPIQHQDWMSGKEFKCKVNNKDLPAPIERTISKPKGSVRAPQVYVLPPPEEEMTKKQVTLTCMVTDFMPEDIYVEWTNNGKTELNYKNTEPVLDSDGSYFMYSKLRVEKKNWVERNSYSCSVVHEGLHNHHTTKSFSRTPGK

SEQ ID NO: 120 - protein, 236 aa, Artificial Sequence
  Description of Artificial Sequence: Synthetic polypeptide
MDFGLIFFIVALLKGVQCDIVLTQSPASLAVSLGQRATISCRASESVDDYGISFMNWFQQKPGQPPKLLIYAAPNQGSGVPARFSGSGSGTDFSLNIHPMEEDDTAMYFCQQSKDVRWTFGGGTKLEIKRADAAPTVSIFPPSSEQLTSGGASVVCFLNNFYPKDINVKWKIDGSERQNGVLNSWTDQDSKDSTYSMSSTLTLTKDEYERHNSYTCEATHKTSTSPIVKSFNRNEC

SEQ ID NO: 121 - protein, 548 aa, Artificial Sequence
  Description of Artificial Sequence: Synthetic polypeptide
MEKDTLLLWVLLLWVPGSTGEVKLVESGGGLVQPGGSLKLSCAASGFDFSRYWMSWVRQAPGKGLEWIGEINLDSSTINYTPSLKDKFIISRDNAKNTLYLQMSKVRSEDTALYYCARRYDAMDYWGQGTSVTVSSASTGGGGSGGGGSGGGGSGGGGSDIVLTQSPASLAVSQGQRATISCRASESVDDYGISFMNWFQQKPGQPPKLLIYAAPNQGSGVPARFSGSGSGTDFSLNIHPMEEDDTATYFCQQSKDVRWTFGGGTKLEIKRGGGGSGGGGSGGGGSGGGGSEVQLVESGGGLVQPGGSLRLSCAASGFNIKDTYIHWVRQAPGKGLEWVARIYPTNGYTRYADSVKGRFTISADTSKNTAYLQMNSLRAEDTAVYYCSRWGGDGFYAMDYWGQGTLVTVSSASTGGGGSGGGGSGGGGSDIQMTQSPSSLSASVGDRVTITCRASQDVNTAVAWYQQKPGKAPKLLIYSASFLYSGVPSRFSGSRSGTDFTLTISSLQPEDFATYYCQQHYTTPPTFGQGTKVEIKRTSRGPHHHHHH

SEQ ID NO: 122 - protein, 543 aa, Artificial Sequence
  Description of Artificial Sequence: Synthetic polypeptide
MDFGLIFFIVALLKGVQCDIVLTQSPASLAVSQGQRATISCRASESVDDYGISFMNWFQQKPGQPPKLLIYAAPNQGSGVPARFSGSGSGTDFSLNIHPMEEDDTATYFCQQSKDVRWTFGGGTKLEIKRGGGGSGGGGSGGGGSGGGGSEVKLVESGGGLVQPGGSLKLSCAASGFDFSRYWMSWVRQAPGKGLEWIGEINLDSSTINYTPSLKDKFIISRDNAKNTLYLQMSKVRSEDTALYYCARRYDAMDYWGQGTSVTVSSGGGGSGGGGSGGGGSGGGGSEVQLVESGGGLVQPGGSLRLSCAASGFNIKDTYIHWVRQAPGKGLEWVARIYPTNGYTRYADSVKGRFTISADTSKNTAYLQMNSLRAEDTAVYYCSRWGGDGFYAMDYWGQGTLVTVSSASTGGGGSGGGGSGGGGSDIQMTQSPSSLSASVGDRVTITCRASQDVNTAVAWYQQKPGKAPKLLIYSASFLYSGVPSRFSGSRSGTDFTLTISSLQPEDFATYYCQQHYTTPPTFGQGTKVEIKRTSRGPHHHHHH

SEQ ID NO: 123-200 - skipped (78 entries)

SEQ ID NO: 201 - DNA, 1389 bp, Artificial Sequence
  Description of Artificial Sequence: Synthetic polynucleotide
atggagtttgggctgagctgggttttcctcgttgctctttttagaggtgtccagtgtcaggtgcagctgcaggagtcgggcccaggactggtgaagccttcggagaccctgtccctcacctgcactgtctctggtggctccgtcagcagtggtgattactactggacctggatccggcagtccccagggaagggactggagtggattggacacatctattacagtgggaacaccaattataacccctccctcaagagtcgactcaccatatcaattgacacgtccaagactcagttctccctgaagctgagttctgtgaccgctgcggacacggccatttattactgtgtgcgagatcgagtgactggtgcttttgatatctggggccaagggacaatggtcaccgtctcttcagcctccaccaagggcccatcggtcttccccctggcgccctgctccaggagcacctccgagagcacagcggccctgggctgcctggtcaaggactacttccctgaaccggtgacggtgtcgtggaactcaggcgctctgaccagcggcgtgcacaccttcccggctgtcctacagtcctcaggactctactccctcagcagcgtggtgaccgtgccctccagcaacttcggcacccagacctacacctgcaacgtagatcacaagcccagcaataccaaggtggacaagacagttgagcgcaaatgttgtgtcgagtgcccaccgtgcccagcaccacctgtggcaggaccgtcagtcttcctcttccccccaaaacccaaggacaccctcatgatctcccggacccctgaggtcacgtgcgtggtggtggacgtgagccacgaagaccccgaggtccagttcaactggtacgtggacggcgtggaggtgcataatgccaagacaaagccacgggaggagcagttccaaagcacgttccgtgtggtcagcgtcctcaccgtcgtgcaccaggactggctgaacggcaaggagtacaagtgcaaggtctccaacaaaggcctcccagcccccatcgagaaaaccatctccaaaaccaaagggcagccccgagaaccacaggtgtacaccctgcccccatcccgggaggagatgaccaagaaccaggtcagcctgacctgcctggtcaaaggcttctaccccagcgacatcgccgtggagtgggagagcaatgggcagccggagaacaactacaagaccacgcctcccatgctggactccgacggctccttcttcctctacagcaagctcaccgtggacaagagcaggtggcagcaggggaacgtcttctcatgctccgtgatgcatgaggctctgcacaaccactacacgcagaagagcctctccctgtctccgggt

SEQ ID NO: 202 - DNA, 1041 bp, Artificial Sequence
  Description of Artificial Sequence: Synthetic polynucleotide
atgccacctcctcgcctcctcttcttcctcctcttcctcacccccatggaagtcaggcccgaggaacctctagtggtgaaggtggaagagggagataacgctgtgctgcagtgcctcaaggggacctcagatggccccactcagcagctgacctggtctcgggagtccccgcttaaacccttcttaaaactcagcctggggctgccaggcctgggaatccacatgaggcccctggccatctggcttttcatcttcaacgtctctcaacagatggggggcttctacctgtgccagccggggcccccctctgagaaggcctggcagcctggctggacagtcaatgtggagggcagcgggggaggtgggtctggaggtggaggatctggtggaggtgggtctgacatccagatgacccagtctccatcctccctgtctgcatctgtaggagacagagtcaccatcacttgccaggcgagtcaggacatcagcaactatttaaattggtatcagcagaaaccagggaaagcccctaaactcctgatctacgatgcatccaatttggaaacaggggtcccatcaaggttcagtggaagtggatctgggacagattttactttcaccatcagcagcctgcagcctgaagatattgcaacatatttctgtcaacactttgatcatctcccgctcgctttcggcggagggaccaaggtggagatcaaacgaactgtggctgcaccatctgtcttcatcttcccgccatctgatgagcagttgaaatctggaactgcctctgttgtgtgcctgctgaataacttctatcccagagaggccaaagtacagtggaaggtggataacgccctccaatcgggtaactcccaggagagtgtcacagagcaggacagcaaggacagcacctacagcctcagcagcaccctgacgctgagcaaagcagactacgagaaacacaaagtctacgcctgcgaagtcacccatcagggcctgagctcgcccgtcacaaagagcttcaacaggggagagtgt

SEQ ID NO: 203 - DNA, 1731 bp, Artificial Sequence
  Description of Artificial Sequence: Synthetic polynucleotide
atgccacctcctcgcctcctcttcttcctcctcttcctcacccccatggaagtcaggcccgaggaacctctagtggtgaaggtggaagagggagataacgctgtgctgcagtgcctcaaggggacctcagatggccccactcagcagctgacctggtctcgggagtccccgcttaaacccttcttaaaactcagcctggggctgccaggcctgggaatccacatgaggcccctggccatctggcttttcatcttcaacgtctctcaacagatggggggcttctacctgtgccagccggggcccccctctgagaaggcctggcagcctggctggacagtcaatgtggagggcagcgggggaggtgggtctggaggtggaggatctggtggaggtgggtctcaggtgcagctgcaggagtcgggcccaggactggtgaagccttcggagaccctgtccctcacctgcactgtctctggtggctccgtcagcagtggtgattactactggacctggatccggcagtccccagggaagggactggagtggattggacacatctattacagtgggaacaccaattataacccctccctcaagagtcgactcaccatatcaattgacacgtccaagactcagttctccctgaagctgagttctgtgaccgctgcggacacggccatttattactgtgtgcgagatcgagtgactggtgcttttgatatctggggccaagggacaatggtcaccgtctcttcagcctccaccaagggcccatcggtcttccccctggcgccctgctccaggagcacctccgagagcacagcggccctgggctgcctggtcaaggactacttccctgaaccggtgacggtgtcgtggaactcaggcgctctgaccagcggcgtgcacaccttcccggctgtcctacagtcctcaggactctactccctcagcagcgtggtgaccgtgccctccagcaacttcggcacccagacctacacctgcaacgtagatcacaagcccagcaataccaaggtggacaagacagttgagcgcaaatgttgtgtcgagtgcccaccgtgcccagcaccacctgtggcaggaccgtcagtcttcctcttccccccaaaacccaaggacaccctcatgatctcccggacccctgaggtcacgtgcgtggtggtggacgtgagccacgaagaccccgaggtccagttcaactggtacgtggacggcgtggaggtgcataatgccaagacaaagccacgggaggagcagttccaaagcacgttccgtgtggtcagcgtcctcaccgtcgtgcaccaggactggctgaacggcaaggagtacaagtgcaaggtctccaacaaaggcctcccagcccccatcgagaaaaccatctccaaaaccaaagggcagccccgagaaccacaggtgtacaccctgcccccatcccgggaggagatgaccaagaaccaggtcagcctgacctgcctggtcaaaggcttctaccccagcgacatcgccgtggagtgggagagcaatgggcagccggagaacaactacaagaccacgcctcccatgctggactccgacggctccttcttcctctacagcaagctcaccgtggacaagagcaggtggcagcaggggaacgtcttctcatgctccgtgatgcatgaggctctgcacaaccactacacgcagaagagcctctccctgtctccgggt

SEQ ID NO: 204 - DNA, 702 bp, Artificial Sequence
  Description of Artificial Sequence: Synthetic polynucleotide
atggagacagacacactcctgctatgggtactgctgctctgggttccaggttccactggtgacatccagatgacccagtctccatcctccctgtctgcatctgtaggagacagagtcaccatcacttgccaggcgagtcaggacatcagcaactatttaaattggtatcagcagaaaccagggaaagcccctaaactcctgatctacgatgcatccaatttggaaacaggggtcccatcaaggttcagtggaagtggatctgggacagattttactttcaccatcagcagcctgcagcctgaagatattgcaacatatttctgtcaacactttgatcatctcccgctcgctttcggcggagggaccaaggtggagatcaaacgaactgtggctgcaccatctgtcttcatcttcccgccatctgatgagcagttgaaatctggaactgcctctgttgtgtgcctgctgaataacttctatcccagagaggccaaagtacagtggaaggtggataacgccctccaatcgggtaactcccaggagagtgtcacagagcaggacagcaaggacagcacctacagcctcagcagcaccctgacgctgagcaaagcagactacgagaaacacaaagtctacgcctgcgaagtcacccatcagggcctgagctcgcccgtcacaaagagcttcaacaggggagagtgt

SEQ ID NO: 205 - DNA, 1068 bp, Artificial Sequence
  Description of Artificial Sequence: Synthetic polynucleotide
atggagacagacacactcctgctatgggtactgctgctctgggttccaggttccactggtgacatccagatgacccagtctccatcctccctgtctgcatctgtaggagacagagtcaccatcacttgccaggcgagtcaggacatcagcaactatttaaattggtatcagcagaaaccagggaaagcccctaaactcctgatctacgatgcatccaatttggaaacaggggtcccatcaaggttcagtggaagtggatctgggacagattttactttcaccatcagcagcctgcagcctgaagatattgcaacatatttctgtcaacactttgatcatctcccgctcgctttcggcggagggaccaaggtggagatcaaacgaactgtggctgcaccatctgtcttcatcttcccgccatctgatgagcagttgaaatctggaactgcctctgttgtgtgcctgctgaataacttctatcccagagaggccaaagtacagtggaaggtggataacgccctccaatcgggtaactcccaggagagtgtcacagagcaggacagcaaggacagcacctacagcctcagcagcaccctgacgctgagcaaagcagactacgagaaacacaaagtctacgcctgcgaagtcacccatcagggcctgagctcgcccgtcacaaagagcttcaacaggggagagtgtgacaaaactcacacatcgccaccgtccccagcacctgaagccgcggggggaccgtcagaagtcaggcccgaggaacctctagtggtgaaggtggaagagggagataacgctgtgctgcagtgcctcaaggggacctcagatggccccactcagcagctgacctggtctcgggagtccccgcttaaacccttcttaaaactcagcctggggctgccaggcctgggaatccacatgaggcccctggccatctggcttttcatcttcaacgtctctcaacagatggggggcttctacctgtgccagccggggcccccctctgagaaggcctggcagcctggctggacagtcaatgtggagggcagcggg

SEQ ID NO: 206 - DNA, 1743 bp, Artificial Sequence
  Description of Artificial Sequence: Synthetic polynucleotide
atggagtttgggctgagctgggttttcctcgttgctctttttagaggtgtccagtgtcaggtgcagctgcaggagtcgggcccaggactggtgaagccttcggagaccctgtccctcacctgcactgtctctggtggctccgtcagcagtggtgattactactggacctggatccggcagtccccagggaagggactggagtggattggacacatctattacagtgggaacaccaattataacccctccctcaagagtcgactcaccatatcaattgacacgtccaagactcagttctccctgaagctgagttctgtgaccgctgcggacacggccatttattactgtgtgcgagatcgagtgactggtgcttttgatatctggggccaagggacaatggtcaccgtctcttcagcctccaccaagggcccatcggtcttccccctggcgccctgctccaggagcacctccgagagcacagcggccctgggctgcctggtcaaggactacttccctgaaccggtgacggtgtcgtggaactcaggcgctctgaccagcggcgtgcacaccttcccggctgtcctacagtcctcaggactctactccctcagcagcgtggtgaccgtgccctccagcaacttcggcacccagacctacacctgcaacgtagatcacaagcccagcaataccaaggtggacaagacagttgagcgcaaatgttgtgtcgagtgcccaccgtgcccagcaccacctgtggcaggaccgtcagtcttcctcttccccccaaaacccaaggacaccctcatgatctcccggacccctgaggtcacgtgcgtggtggtggacgtgagccacgaagaccccgaggtccagttcaactggtacgtggacggcgtggaggtgcataatgccaagacaaagccacgggaggagcagttccaaagcacgttccgtgtggtcagcgtcctcaccgtcgtgcaccaggactggctgaacggcaaggagtacaagtgcaaggtctccaacaaaggcctcccagcccccatcgagaaaaccatctccaaaaccaaagggcagccccgagaaccacaggtgtacaccctgcccccatcccgggaggagatgaccaagaaccaggtcagcctgacctgcctggtcaaaggcttctaccccagcgacatcgccgtggagtgggagagcaatgggcagccggagaacaactacaagaccacgcctcccatgctggactccgacggctccttcttcctctacagcaagctcaccgtggacaagagcaggtggcagcaggggaacgtcttctcatgctccgtgatgcatgaggctctgcacaaccactacacgcagaagagcctctccctgtctccgggtggtggaggtgggtctggaggtggaggatctggtggaggtgggtctgaagtcaggcccgaggaacctctagtggtgaaggtggaagagggagataacgctgtgctgcagtgcctcaaggggacctcagatggccccactcagcagctgacctggtctcgggagtccccgcttaaacccttcttaaaactcagcctggggctgccaggcctgggaatccacatgaggcccctggccatctggcttttcatcttcaacgtctctcaacagatggggggcttctacctgtgccagccggggcccccctctgagaaggcctggcagcctggctggacagtcaatgtggagggcagcggg

SEQ ID NO: 207 - DNA, 1380 bp, Artificial Sequence
  Description of Artificial Sequence: Synthetic polynucleotide
atggagtttgggctgagctgggttttcctcgttgctctttttagaggtgtccagtgtcaggttcagctggtgcagtctggtgctgaggtgaagaagcctggtgcctcagtgaaggtctcctgcaaggcttctggttacacattcactgactactacatgcactgggtgcgtcaggcccctggtcaaggtcttgagtggatgggtcgtgttaatcctaaccggaggggtactacctacaaccagaaattcgagggccgtgtcaccatgaccacagacacatccacgagcacagcctacatggagctgcgtagcctgcgttctgacgacacggccgtgtattactgtgcgcgtgcgaactggcttgactactggggccagggcaccaccgtcaccgtctcctccgcctccaccaagggcccatcggtcttcccgctagcgccctgctccaggagcacctccgagagcacagccgccctgggctgcctggtcaaggactacttccccgaaccggtgacggtgtcgtggaactcaggcgccctgaccagcggcgtgcacaccttcccggctgtcctacagtcctcaggactctactccctcagcagcgtggtgaccgtgccctccagcagcttgggcacgaagacctacacctgcaacgtagatcacaagcccagcaacaccaaggtggacaagagagttgagtccaaatatggtcccccatgcccaccctgcccagcacctgaggccgccgggggaccatcagtcttcctgttccccccaaaacccaaggacactctcatgatctcccggacccctgaggtcacgtgcgtggtggtggacgtgagccaggaagaccccgaggtccagttcaactggtacgtggatggcgtggaggtgcataatgccaagacaaagccgcgggaggagcagttcaacagcacgtaccgtgtggtcagcgtcctcaccgtcctgcaccaggactggctgaacggcaaggagtacaagtgcaaggtctccaacaaaggcctcccgtcctccatcgagaaaaccatctccaaagccaaagggcagccccgagagccacaggtgtacaccctgcccccatcccaggaggagatgaccaagaaccaggtcagcctgacctgcctggtcaaaggcttctaccccagcgacatcgccgtggagtgggaaagcaatgggcagccggagaacaactacaagaccacgcctcccgtgctggactccgacggctccttcttcctctacagcaggctaaccgtggacaagagcaggtggcaggaggggaatgtcttctcatgctccgtgatgcatgaggctctgcacaaccactacacacagaagagcctctccctgtctctgggt

SEQ ID NO: 208 - DNA, 1049 bp, Artificial Sequence
  Description of Artificial Sequence: Synthetic polynucleotide
atgccacctcctcgcctcctcttcttcctcctcttcctcacccccatggaagtcaggcccgaggaacctctagtggtgaaggtggaagagggagataacgctgtgctgcagtgcctcaaggggacctcagatggccccactcagcagctgacctggtctcgggagtccccgcttaaacccttcttaaaactcagcctggggctgccaggcctgggaatccacatgaggcccctggccatctggcttttcatcttcaacgtctctcaacagatggggggcttctacctgtgccagccggggcccccctctgagaaggcctggcagcctggctggacagtcaatgtggagggcagcgggggaggtgggtctggaggtggaggatctggtggaggtgggtctgacatccagatgacccagtctccatcctccctgtctgcatctgtaggagacagagtcaccatcacttgcagtgtcagctcaagtgtatcctccatttacttgcactggtatcagcagaaaccagggaaagcccctaagctcctgatctatagcacatccaacttggcttctggagtcccatcaaggttcagtggcagtggatctgggacagatttcactctcaccatcagcagtctgcaacctgaagattttgcaacttactactgtcaagtctacagtggttacccgctcacgttcggcggagggaccaaggtggagatcaaacgaactgtggctgcaccatctgtcttcatcttcccgccatctgatgagcagttgaaatctggaactgcctctgttgtgtgcctgctgaataacttctatcccagagaggccaaagtacagtggaaggtggataacgccctccaatcgggtaactcccaggagagtgtcacagagcaggacagcaaggacagcacctacagcctcagcagcaccctgacgctgagcaaagcagactacgagaaacacaaagtctacgcctgcgaagtcacccatcagggcctgagctcgcccgtcacaaagagcttcaacaggggagagtgctaata

SEQ ID NO: 209 - DNA, 1719 bp, Artificial Sequence
  Description of Artificial Sequence: Synthetic polynucleotide
atgccacctcctcgcctcctcttcttcctcctcttcctcacccccatggaagtcaggcccgaggaacctctagtggtgaaggtggaagagggagataacgctgtgctgcagtgcctcaaggggacctcagatggccccactcagcagctgacctggtctcgggagtccccgcttaaacccttcttaaaactcagcctggggctgccaggcctgggaatccacatgaggcccctggccatctggcttttcatcttcaacgtctctcaacagatggggggcttctacctgtgccagccggggcccccctctgagaaggcctggcagcctggctggacagtcaatgtggagggcagcgggggaggtgggtctggaggtggaggatctggtggaggtgggtctcaggttcagctggtgcagtctggtgctgaggtgaagaagcctggtgcctcagtgaaggtctcctgcaaggcttctggttacacattcactgactactacatgcactgggtgcgtcaggcccctggtcaaggtcttgagtggatgggtcgtgttaatcctaaccggaggggtactacctacaaccagaaattcgagggccgtgtcaccatgaccacagacacatccacgagcacagcctacatggagctgcgtagcctgcgttctgacgacacggccgtgtattactgtgcgcgtgcgaactggcttgactactggggccagggcaccaccgtcaccgtctcctccgcctccaccaagggcccatcggtcttcccgctagcgccctgctccaggagcacctccgagagcacagccgccctgggctgcctggtcaaggactacttccccgaaccggtgacggtgtcgtggaactcaggcgccctgaccagcggcgtgcacaccttcccggctgtcctacagtcctcaggactctactccctcagcagcgtggtgaccgtgccctccagcagcttgggcacgaagacctacacctgcaacgtagatcacaagcccagcaacaccaaggtggacaagagagttgagtccaaatatggtcccccatgcccaccctgcccagcacctgaggccgccgggggaccatcagtcttcctgttccccccaaaacccaaggacactctcatgatctcccggacccctgaggtcacgtgcgtggtggtggacgtgagccaggaagaccccgaggtccagttcaactggtacgtggatggcgtggaggtgcataatgccaagacaaagccgcgggaggagcagttcaacagcacgtaccgtgtggtcagcgtcctcaccgtcctgcaccaggactggctgaacggcaaggagtacaagtgcaaggtctccaacaaaggcctcccgtcctccatcgagaaaaccatctccaaagccaaagggcagccccgagagccacaggtgtacaccctgcccccatcccaggaggagatgaccaagaaccaggtcagcctgacctgcctggtcaaaggcttctaccccagcgacatcgccgtggagtgggaaagcaatgggcagccggagaacaactacaagaccacgcctcccgtgctggactccgacggctccttcttcctctacagcaggctaaccgtggacaagagcaggtggcaggaggggaatgtcttctcatgctccgtgatgcatgaggctctgcacaaccactacacacagaagagcctctccctgtctctg

SEQ ID NO: 210 - DNA, 705 bp, Artificial Sequence
  Description of Artificial Sequence: Synthetic polynucleotide
atggagacagacacactcctgctatgggtactgctgctctgggttccaggttccactggtgacatccagatgacccagtctccatcctccctgtctgcatctgtaggagacagagtcaccatcacttgcagtgtcagctcaagtgtatcctccatttacttgcactggtatcagcagaaaccagggaaagcccctaagctcctgatctatagcacatccaacttggcttctggagtcccatcaaggttcagtggcagtggatctgggacagatttcactctcaccatcagcagtctgcaacctgaagattttgcaacttactactgtcaagtctacagtggttacccgctcacgttcggcggagggaccaaggtggagatcaaacgaactgtggctgcaccatctgtcttcatcttcccgccatctgatgagcagttgaaatctggaactgcctctgttgtgtgcctgctgaataacttctatcccagagaggccaaagtacagtggaaggtggataacgccctccaatcgggtaactcccaggagagtgtcacagagcaggacagcaaggacagcacctacagcctcagcagcaccctgacgctgagcaaagcagactacgagaaacacaaagtctacgcctgcgaagtcacccatcagggcctgagctcgcccgtcacaaagagcttcaacaggggagagtgc

SEQ ID NO: 211 - DNA, 1071 bp, Artificial Sequence
  Description of Artificial Sequence: Synthetic polynucleotide
atggagacagacacactcctgctatgggtactgctgctctgggttccaggttccactggtgacatccagatgacccagtctccatcctccctgtctgcatctgtaggagacagagtcaccatcacttgcagtgtcagctcaagtgtatcctccatttacttgcactggtatcagcagaaaccagggaaagcccctaagctcctgatctatagcacatccaacttggcttctggagtcccatcaaggttcagtggcagtggatctgggacagatttcactctcaccatcagcagtctgcaacctgaagattttgcaacttactactgtcaagtctacagtggttacccgctcacgttcggcggagggaccaaggtggagatcaaacgaactgtggctgcaccatctgtcttcatcttcccgccatctgatgagcagttgaaatctggaactgcctctgttgtgtgcctgctgaataacttctatcccagagaggccaaagtacagtggaaggtggataacgccctccaatcgggtaactcccaggagagtgtcacagagcaggacagcaaggacagcacctacagcctcagcagcaccctgacgctgagcaaagcagactacgagaaacacaaagtctacgcctgcgaagtcacccatcagggcctgagctcgcccgtcacaaagagcttcaacaggggagagtgcgacaaaactcacacatcgccaccgtccccagcacctgaagccgcggggggaccgtcagaagtcaggcccgaggaacctctagtggtgaaggtggaagagggagataacgctgtgctgcagtgcctcaaggggacctcagatggccccactcagcagctgacctggtctcgggagtccccgcttaaacccttcttaaaactcagcctggggctgccaggcctgggaatccacatgaggcccctggccatctggcttttcatcttcaacgtctctcaacagatggggggcttctacctgtgccagccggggcccccctctgagaaggcctggcagcctggctggacagtcaatgtggagggcagcggg

SEQ ID NO: 212 - DNA, 1734 bp, Artificial Sequence
  Description of Artificial Sequence: Synthetic polynucleotide
atggagtttgggctgagctgggttttcctcgttgctctttttagaggtgtccagtgtcaggttcagctggtgcagtctggtgctgaggtgaagaagcctggtgcctcagtgaaggtctcctgcaaggcttctggttacacattcactgactactacatgcactgggtgcgtcaggcccctggtcaaggtcttgagtggatgggtcgtgttaatcctaaccggaggggtactacctacaaccagaaattcgagggccgtgtcaccatgaccacagacacatccacgagcacagcctacatggagctgcgtagcctgcgttctgacgacacggccgtgtattactgtgcgcgtgcgaactggcttgactactggggccagggcaccaccgtcaccgtctcctccgcctccaccaagggcccatcggtcttcccgctagcgccctgctccaggagcacctccgagagcacagccgccctgggctgcctggtcaaggactacttccccgaaccggtgacggtgtcgtggaactcaggcgccctgaccagcggcgtgcacaccttcccggctgtcctacagtcctcaggactctactccctcagcagcgtggtgaccgtgccctccagcagcttgggcacgaagacctacacctgcaacgtagatcacaagcccagcaacaccaaggtggacaagagagttgagtccaaatatggtcccccatgcccaccctgcccagcacctgaggccgccgggggaccatcagtcttcctgttccccccaaaacccaaggacactctcatgatctcccggacccctgaggtcacgtgcgtggtggtggacgtgagccaggaagaccccgaggtccagttcaactggtacgtggatggcgtggaggtgcataatgccaagacaaagccgcgggaggagcagttcaacagcacgtaccgtgtggtcagcgtcctcaccgtcctgcaccaggactggctgaacggcaaggagtacaagtgcaaggtctccaacaaaggcctcccgtcctccatcgagaaaaccatctccaaagccaaagggcagccccgagagccacaggtgtacaccctgcccccatcccaggaggagatgaccaagaaccaggtcagcctgacctgcctggtcaaaggcttctaccccagcgacatcgccgtggagtgggaaagcaatgggcagccggagaacaactacaagaccacgcctcccgtgctggactccgacggctccttcttcctctacagcaggctaaccgtggacaagagcaggtggcaggaggggaatgtcttctcatgctccgtgatgcatgaggctctgcacaaccactacacacagaagagcctctccctgtctctgggtggtggaggtgggtctggaggtggaggatctggtggaggtgggtctgaagtcaggcccgaggaacctctagtggtgaaggtggaagagggagataacgctgtgctgcagtgcctcaaggggacctcagatggccccactcagcagctgacctggtctcgggagtccccgcttaaacccttcttaaaactcagcctggggctgccaggcctgggaatccacatgaggcccctggccatctggcttttcatcttcaacgtctctcaacagatggggggcttctacctgtgccagccggggcccccctctgagaaggcctggcagcctggctggacagtcaatgtggagggcagcggg

SEQ ID NO: 213 - DNA, 1938 bp, Artificial Sequence
  Description of Artificial Sequence: Synthetic polynucleotide
atggagacagacacactcctgctatgggtactgctgctctgggttccaggttccactggtgacatccagatgacacagactacatcctccctgtctgcctctctgggagacagagtcaccatcagttgcagggcaagtcaggacattagtaaatatttaaattggtatcagcagaaaccagatggaactgttaaactcctgatctaccatacatcaagattacactcaggagtcccatcaaggttcagtggcagtgggtctggaacagattattctctcaccattagcaacctggagcaagaagatattgccacttacttttgccaacagggtaatacgcttccgtacacgttcggaggggggactaagttggaaataacaggaggaggtgggtctggaggtggaggatctggtggaggtgggtctggaggaggtgggtctgaggtgaaactgcaggagtcaggacctggcctggtggcgccctcacagagcctgtccgtcacatgcactgtctcaggggtctcattacccgactatggtgtaagctggattcgccagcctccacgaaagggtctggagtggctgggagtaatatggggtagtgaaaccacatactataattcagctctcaaatccagactgaccatcatcaaggacaactccaagagccaagttttcttaaaaatgaacagtctgcaaactgatgacacagccatttactactgtgccaaacattattactacggtggtagctatgctatggactactggggtcaaggaacctcagtcaccgtctcctcaccgagccagttccgggtgtcgccgctggatcggacctggaacctgggcgagacagtggagctgaagtgccaggtgctgctgtccaacccgacgtcgggctgctcgtggctcttccagccgcgcggcgccgccgccagtcccaccttcctcctatacctctcccaaaacaagcccaaggcggccgaggggctggacacccagcggttctcgggcaagaggttgggggacaccttcgtcctcaccctgagcgacttccgccgagagaacgagggctactatttctgctcggccctgagcaactccatcatgtacttcagccacttcgtgccggtcttcctgccagcgaagcccaccacgacgccagcgccgcgaccaccaacaccggcgcccaccatcgcgtcgcagcccctgtccctgcgcccagaggcgtgccggccagcggcggggggcgcagtgcacacgagggggctggacttcgcctgtgatatctacatctgggcgcccttggccgggacttgtggggtccttctcctgtcactggttatcaccaggagtaagaggagcaggctcctgcacagtgactacatgaacatgactccccgccgccccgggcccacccgcaagcattaccagccctatgccccaccacgcgacttcgcagcctatcgctccaaacggggcagaaagaaactcctgtatatattcaaacaaccatttatgagaccagtacaaactactcaagaggaagatggctgtagctgccgatttccagaagaagaagaaggaggatgtgaactgagagtgaagttcagcaggagcgcagacgcccccgcgtaccagcagggccagaaccagctctataacgagctcaatctaggacgaagagaggagtacgatgttttggacaagagacgtggccgggaccctgagatggggggaaagccgcagagaaggaagaaccctcaggaaggcctgtacaatgaactgcagaaagataagatggcggaggcctacagtgagattgggatgaaaggcgagcgccggaggggcaaggggcacgatggcctttaccagggtctcagtacagccaccaaggacacctacgacgcccttcacatgcaggccctgccccctcgc

SEQ ID NO: 214 - DNA, 375 bp, Artificial Sequence
  Description of Artificial Sequence: Synthetic polynucleotide
atgccacctcctcgcctcctcttcttcctcctcttcctcacccccatggaagtcaggcccgaggaacctctagtggtgaaggtggaagagggagataacgctgtgctgcagtgcctcaaggggacctcagatggccccactcagcagctgacctggtctcgggagtccccgcttaaacccttcttaaaactcagcctggggctgccaggcctgggaatccacatgaggcccctggccatctggcttttcatcttcaacgtctctcaacagatggggggcttctacctgtgccagccggggcccccctctgagaaggcctggcagcctggctggacagtcaatgtggagggcagcgggcatcatcaccatcaccat

SEQ ID NO: 215 - DNA, 1035 bp, Artificial Sequence
  Description of Artificial Sequence: Synthetic polynucleotide
atgccacctcctcgcctcctcttcttcctcctcttcctcacccccatggaagtcaggcccgaggaacctctagtggtgaaggtggaagagggagataacgctgtgctgcagtgcctcaaggggacctcagatggccccactcagcagctgacctggtctcgggagtccccgcttaaacccttcttaaaactcagcctggggctgccaggcctgggaatccacatgaggcccctggccatctggcttttcatcttcaacgtctctcaacagatggggggcttctacctgtgccagccggggcccccctctgagaaggcctggcagcctggctggacagtcaatgtggagggcagcggggacaaaactcacacatgcccaccgtgcccagcacctgaactcctggggggaccgtcagtcttcctcttccccccaaaacccaaggacaccctcatgatctcccggacccctgaggtcacatgcgtggtggtggacgtgagccacgaagaccctgaggtcaagttcaactggtacgtggacggcgtggaggtgcataatgccaagacaaagccgcgggaggagcagtacaacagcacgtaccgtgtggtcagcgtcctcaccgtcctgcaccaggactggctgaatggcaaggagtacaagtgcaaggtctccaacaaagccctcccagcccccatcgagaaaaccatctccaaagccaaagggcagccccgagaaccacaggtgtacaccctgcccccatcccgggaggagatgaccaagaaccaggtcagcctgacctgcctggtcaaaggcttctatcccagcgacatcgccgtggagtgggagagcaatgggcagccggagaacaactacaagaccacgcctcccgtgctggactccgacggctccttcttcctctacagcaagctcaccgtggacaagagcaggtggcagcaggggaacgtcttctcatgctccgtgatgcacgaggctctgcacaaccactacacgcagaagagcctctccctgtctccgggt

SEQ ID NO: 216 - DNA, 822 bp, Artificial Sequence
  Description of Artificial Sequence: Synthetic polynucleotide
atggagtttgggctgagctgggttttcctcgttgctctttttagaggtgtccagtgtgaggtgcagctggtggagtctggtggtggtcttgttcaacctggtggttctcttcgtctttcttgtgctgcttctggttttaatattaaagatacttatattcattgggttcgtcaagctcctggtaaaggtcttgaatgggttgctcgtatttatcctactaatggttatactcgttatgctgattctgttaaaggtcgttttactatttctgctgatacttctaaaaatactgcttatcttcaaatgaactctcttcgtgctgaagatactgctgtttattattgttctcgttggggtggtgatggtttttatgctatggattattggggtcaaggtactcttgtcaccgtctcctcagctagcaccgggggaggtgggtctggaggtggaggatctggtggaggtgggtctgacatccagatgacccagtctccttcttctctttctgcttctgttggtgatcgtgttactattacttgtcgtgcttctcaagatgttaatactgctgttgcttggtatcaacaaaaacctggtaaagctcctaaacttcttatttattctgcttcttttctttattctggtgttccttctcgtttttctggttctcgttctggtactgattttactcttactatttcttctcttcaacctgaagattttgctacttattattgtcaacaacattatactactcctcctacttttggtcaaggtaccaaggtggagatcaaacgtacggggccccatcatcaccatcaccat

SEQ ID NO: 217 - DNA, 840 bp, Artificial Sequence
  Description of Artificial Sequence: Synthetic polynucleotide
atggagtttgggctgagctgggttttcctcgttgctctttttagaggtgtccagtgtcaggtgcagctggtgcagagcggcgccgaggacaagaagcccggcgagagcgtgaagatcagctgcaaggccagcggctacaccttcaccaactacggcatgaactgggtgaggcaggcccccggccagggcctgaagtggatgggctggatcaacacctacaccggcgagagcacctacgccgacgacttcaagggcaggttcgccttcagcctggacaccagcgccagcaccgcctacctgcagctgagcagcctgaggggcgaggacaccgccgtgtacttctgcgccaggttcgccatcaagggcgactactggggccagggcaccaccgtgaccgtgagcagcgccagcaccggcggcggcggcagcggcggcggcggcagcggcggcggcggcagcggcggcggcggcagcgacatcgtgatgacccagagccccctgagcctggaggtgagccccggcgagcccgccagcatcagctgcaggagcaccaagagcctgctgcacagcgacggcatcacctacctgtactggtacctgcagaagcccggccagagcccccagctgctgatctaccagctgagcaacctggccagcggcgtgcccgacaggttcagcagcagcggcagcggcaccgacttcaccctgaagatcagcagggtggaggccgaggacgagggcacctactactgcgcccagaacctggagatccccaggaccttcggccagggcaccaagctggagatcaagaggaccgggccccatcatcaccatcaccat

SEQ ID NO: 218 - DNA, 834 bp, Artificial Sequence
  Description of Artificial Sequence: Synthetic polynucleotide
atggagacagacacactcctgctatgggtactgctgctctgggttccaggttccactggtgacatcgtgatgacccagagccccctgagcctgcccgtgacccccggcgagcccgccagcatcagctgcaggagcaccaagagcctgctgcacagcgacggcatcacctacctgtactggtacctgcagaagcccggccagagcccccagctgctgatctaccagctgagcaacctggccagcggcgtgcccgacaggttcagcagcagcggcagcggcaccgacttcaccctgaagatcagcagggtggaggccgaggacgagggcgtgtactactgcgcccagaacctggagatccccaggaccttcggctgcggcaccaagctggagatcaagaggaccggcggcggcggcagcggcggcggcggcagcggcggcggcggcagcggcggcggcggcagccaggtgcagctggtgcagagcggcgccgaggtgaagaagcccggcgagagcgtgaagatcagctgcaaggccagcggctacaccttcaccaactacggcatgaactgggtgaggcaggcccccggccagtgcctgaagtggatgggctggatcaacacctacaccggcgagagcacctacgccgacgacttcaagggcaggttcgccttcagcctggacaccagcgccagcaccgcctacctgcagctgagcagcctgaggagcgaggacaccgccgtgtacttctgcgccaggttcgccatcaagggcgactactggggccagggcaccctggtgaccgtgagcagcgggccccatcatcaccatcaccat

SEQ ID NO: 219 - DNA, 825 bp, Artificial Sequence
  Description of Artificial Sequence: Synthetic polynucleotide
atggagtttgggctgagctgggttttcctcgttgctctttttagaggtgtccagtgtcaggttcagctggtgcagtctggtgctgaggatgtgaagcctgatgcctcagtgaagctctcctgcaaggcttctggttacacattcactgactactacatgcactgggtgcgtcaggcccctggtcaaggtcttgagtggatgggtcgtgttaatcctaaccggaggggtactacctacaaccagaaattcgagggccgtgtcaccatgaccacagacacatccacgagcacagcctacatgcagctgagtagcctgcgtggtgaagacacggccgtgtattactgtgcgcgtgcgaactggcttgactactggggccagggcaccaccgtcaccgtctcctccgcctccaccgggggaggtgggtctggaggtggaggatctggtggaggtgggtctggtggaggtgggtctgacatccagatgacccagtctccatcctccctggaggcatctgtaggagacagagtcaccatcacttgcagtgtcagctcaagtgtatcctccatttacttgcactggtatcagcagaaaccagggaaaagccctaagctcctgatctatagcacatccaacttggcttctggagtcccagataggttcagtggcagtggatctgggacagatttcactctcaccatcagcagtctgcaagccgaagatgagggcacttactactgtcaagtctacagtggttacccgctcacgttcggcggagggaccaagctggagatcaaacgaactgggccccatcatcaccatcaccat

SEQ ID NO: 220 - DNA, 819 bp, Artificial Sequence
  Description of Artificial Sequence: Synthetic polynucleotide
atggagacagacacactcctgctatgggtactgctgctctgggttccaggttccactggtgacatccagatgacccagtctccatcctccctgtctgcatctgtaggagacagagtcaccatcacttgcagtgtcagctcaagtgtatcctccatttacttgcactggtatcagcagaaaccagggaaagcccctaagctcctgatctatagcacatccaacttggcttctggagtcccatcaaggttcagtggcagtggatctgggacagatttcactctcaccatcagcagtctgcaacctgaagatgaagcaacttactactgtcaagtctacagtggttacccgctcacgttcggctgcgggaccaaggtggagatcaaacgaactgggggaggtgggtctggaggtggaggatctggtggaggtgggtctggtggaggtgggtctcaggttcagctggtgcagtctggtgctgaggataagaagcctggtgcctcagtgaaggtctcctgcaaggcttctggttacacattcactgactactacatgcactgggtgcgtcaggcccctggtcaatgtcttgagtggatgggtcgtgttaatcctaaccggaggggtactacctacaaccagaaattcgagggccgtgtcaccatgaccacagacacatccacgagcacagcctacatggagctgcgtagcctgcgttctgacgacacggccgtgtattactgtgcgcgtgcgaactggcttgactactggggccagggcaccaccgtcaccgtctcctccgggccccatcatcaccatcaccat

SEQ ID NO: 221 - DNA, 834 bp, Artificial Sequence
  Description of Artificial Sequence: Synthetic polynucleotide
atggagtttgggctgagctgggttttcctcgttgctctttttagaggtgtccagtgtcaggtgcagctgcaggagagcggccccggcgacgtgaagcccagcgagaccctgagcctgacctgcaccgtgagcggcggcagcgtgagcagcggcgactactactggacctggatcaggcagagccccggcaagggcctggagtggatcggccacatctactacagcggcaacaccaactacaaccccagcctgaagagcaggctgaccatcagcatcgacaccagcaagaccaccttcagcctgcagctgagcagcgtgaccggcgaggacaccgccatctactactgcgtgagggacagggtgaccggcgccttcgacatctggggccagggcaccaccgtgaccgtgagcagcgccagcaccggcggcggcggcagcggcggcggcggcagcggcggcggcggcagcggcggcggcggcagcgacatccagatgacccagagccccagcagcctggaggccagcgtgggcgacagggtgaccatcacctgccaggccagccaggacatcagcaactacctgaactggtaccagcagaagcccggcaagagccccaagctgctgatctacgacgccagcaacctggagaccggcgtgcccgacaggttcagcggcagcggcagcggcaccgacttcaccttcaccatcagcagcctgcaggccgaggacgagggcacctacttctgccagcacttcgaccacctgcccctggccttcggcggcggcaccaagctggagatcaagaggaccgggccccatcatcaccatcaccat

SEQ ID NO: 222 - DNA, 828 bp, Artificial Sequence
  Description of Artificial Sequence: Synthetic polynucleotide
atggagacagacacactcctgctatgggtactgctgctctgggttccaggttccactggtgacatccagatgacccagagccccagcagcctgagcgccagcgtgggcgacagggtgaccatcacctgccaggccagccaggacatcagcaactacctgaactggtaccagcagaagcccggcaaggcccccaagctgctgatctacgacgccagcaacctggagaccggcgtgcccagcaggttcagcggcagcggcagcggcaccgacttcaccttcaccatcagcagcctgcagcccgaggacgaggccacctacttctgccagcacttcgaccacctgcccctggccttcggctgcggcaccaaggtggagatcaagaggaccggcggcggcggcagcggcggcggcggcagcggcggcggcggcagcggcggcggcggcagccaggtgcagctgcaggagagcggccccggcgacgtgaagcccagcgagaccctgagcctgacctgcaccgtgagcggcggcagcgtgagcagcggcgactactactggacctggatcaggcagagccccggcaagtgcctggagtggatcggccacatctactacagcggcaacaccaactacaaccccagcctgaagagcaggctgaccatcagcatcgacaccagcaagacccagttcagcctgaagctgagcagcgtgaccgccgccgacaccgccatctactactgcgtgagggacagggtgaccggcgccttcgacatctggggccagggcaccaccgtgaccgtgagcagcgggccccatcatcaccatcaccat

SEQ ID NO: 223 - DNA, 1368 bp, Artificial Sequence
  Description of Artificial Sequence: Synthetic polynucleotide
atgccacctcctcgcctcctcttcttcctcctcttcctcacccccatggaagtcaggcatcatcaccatcaccatcccgaggaacctctagtggtgaaggtggaagagggagataacgctgtgctgcagtgcctcaaggggacctcagatggccccactcagcagctgacctggtctcgggagtccccgcttaaacccttcttaaaactcagcctggggctgccaggcctgggaatccacatgaggcccctggccatctggcttttcatcttcaacgtctctcaacagatggggggcttctacctgtgccagccggggcccccctctgagaaggcctggcagcctggctggacagtcaatgtggagggcagcggggagctgttccggtggaatgtttcggacctaggtggcctgggctgtggcctgaagaacaggtcctcagagggccccagctccccttccgggaagctcatgagccccaagctgtatgtgtgggccaaagaccgccctgagatctgggagggagagcctccgtgtctcccaccgagggacagcctgaaccagagcctcagccaggacctcaccatggcccctggctccacactctggctgtcctgtggggtaccccctgactctgtgtccaggggccccctctcctggacccatgtgcaccccaaggggcctaagtcattgctgagcctagagctgaaggacgatcgcccggccagagatatgtgggtaatggagacgggtctgttgttgccccgggccacagctcaagacgctggaaagtattattgtcaccgtggcaacctgaccatgtcattccacctggagatcactgctcggccagggggaggtgggtctggaggtggaggatctggtggaggtgggtctgtcagatcatcttctcgaaccccgagtgacaagcctgtagcccatgttgtagcaaaccctcaagctgaggggcagctccagtggctgaaccgccgggccaatgccctcctggccaatggcgtggagctgagagataaccagctggtggtgccatcagagggcctgtacctcatctactcccaggtcctcttcaagggccaaggctgcccctccacccatgtgctcctcacccacaccatcagccgcatcgccgtctcctaccagaccaaggtcaacctcctctctgccatcaagagcccctgccagagggagaccccagagggggctgaggccaagccctggtatgagcccatctatctgggaggggtcttccagctggagaagggtgaccgactcagcgctgagatcaatcggcccgactatctcgactttgccgagtctgggcaggtctactttgggatcattgccctg

SEQ ID NO: 224 - DNA, 1194 bp, Artificial Sequence
  Description of Artificial Sequence: Synthetic polynucleotide
atggagtttgggctgagctgggttttcctcgttgctctttttagaggtgtccagtgtgaggtgcagctggtggagtctggtggtggtcttgttcaacctggtggttctcttcgtctttcttgtgctgcttctggttttaatattaaagatacttatattcattgggttcgtcaagctcctggtaaaggtcttgaatgggttgctcgtatttatcctactaatggttatactcgttatgctgattctgttaaaggtcgttttactatttctgctgatacttctaaaaatactgcttatcttcaaatgaactctcttcgtgctgaagatactgctgtttattattgttctcgttggggtggtgatggtttttatgctatggattattggggtcaaggtactcttgtcaccgtctcctcagctagcaccgggggaggtgggtctggaggtggaggatctggtggaggtgggtctgacatccagatgacccagtctccttcttctctttctgcttctgttggtgatcgtgttactattacttgtcgtgcttctcaagatgttaatactgctgttgcttggtatcaacaaaaacctggtaaagctcctaaacttcttatttattctgcttcttttctttattctggtgttccttctcgtttttctggttctcgttctggtactgattttactcttactatttcttctcttcaacctgaagattttgctacttattattgtcaacaacattatactactcctcctacttttggtcaaggtaccaaggtggagatcaaacgtacggacaaaactcacacatcgccaccgtccccagcacctgaagccgcggggggaccgtcagaagtcaggcccgaggaacctctagtggtgaaggtggaagagggagataacgctgtgctgcagtgcctcaaggggacctcagatggccccactcagcagctgacctggtctcgggagtccccgcttaaacccttcttaaaactcagcctggggctgccaggcctgggaatccacatgaggcccctggccatctggcttttcatcttcaacgtctctcaacagatggggggcttctacctgtgccagccggggcccccctctgagaaggcctggcagcctggctggacagtcaatgtggagggcagcgggtctagagggccccatcatcaccatcaccat

SEQ ID NO: 225 - DNA, 1842 bp, Artificial Sequence
  Description of Artificial Sequence: Synthetic polynucleotide
atggagtttgggctgagctgggttttcctcgttgctctttttagaggtgtccagtgtgaggtgcagctggtggagtctggtggtggtcttgttcaacctggtggttctcttcgtctttcttgtgctgcttctggttttaatattaaagatacttatattcattgggttcgtcaagctcctggtaaaggtcttgaatgggttgctcgtatttatcctactaatggttatactcgttatgctgattctgttaaaggtcgttttactatttctgctgatacttctaaaaatactgcttatcttcaaatgaactctcttcgtgctgaagatactgctgtttattattgttctcgttggggtggtgatggtttttatgctatggattattggggtcaaggtactcttgtcaccgtctcctcagctagcaccgggggaggtgggtctggaggtggaggatctggtggaggtgggtctgacatccagatgacccagtctccttcttctctttctgcttctgttggtgatcgtgttactattacttgtcgtgcttctcaagatgttaatactgctgttgcttggtatcaacaaaaacctggtaaagctcctaaacttcttatttattctgcttcttttctttattctggtgttccttctcgtttttctggttctcgttctggtactgattttactcttactatttcttctcttcaacctgaagattttgctacttattattgtcaacaacattatactactcctcctacttttggtcaaggtaccaaggtggagatcaaacgtacggacaaaactcacacatcgccaccgtccccagcacctgaagccgcggggggaccgtcagaagtcaggcccgaggaacctctagtggtgaaggtggaagagggagataacgctgtgctgcagtgcctcaaggggacctcagatggccccactcagcagctgacctggtctcgggagtccccgcttaaacccttcttaaaactcagcctggggctgccaggcctgggaatccacatgaggcccctggccatctggcttttcatcttcaacgtctctcaacagatggggggcttctacctgtgccagccggggcccccctctgagaaggcctggcagcctggctggacagtcaatgtggagggcagcggggacaaaactcacacatgcccaccgtgcccagcacctgaactcctggggggaccgtcagtcttcctcttccccccaaaacccaaggacaccctcatgatctcccggacccctgaggtcacatgcgtggtggtggacgtgagccacgaagaccctgaggtcaagttcaactggtacgtggacggcgtggaggtgcataatgccaagacaaagccgcgggaggagcagtacaacagcacgtaccgtgtggtcagcgtcctcaccgtcctgcaccaggactggctgaatggcaaggagtacaagtgcaaggtctccaacaaagccctcccagcccccatcgagaaaaccatctccaaagccaaagggcagccccgagaaccacaggtgtacaccctgcccccatcccgggaggagatgaccaagaaccaggtcagcctgacctgcctggtcaaaggcttctatcccagcgacatcgccgtggagtgggagagcaatgggcagccggagaacaactacaagaccacgcctcccgtgctggactccgacggctccttcttcctctacagcaagctcaccgtggacaagagcaggtggcagcaggggaacgtcttctcatgctccgtgatgcacgaggctctgcacaaccactacacgcagaagagcctctccctgtctccgggt

SEQ ID NO: 226 - DNA, 1188 bp, Artificial Sequence
  Description of Artificial Sequence: Synthetic polynucleotide
atgccacctcctcgcctcctcttcttcctcctcttcctcacccccatggaagtcaggcccgaggaacctctagtggtgaaggtggaagagggagataacgctgtgctgcagtgcctcaaggggacctcagatggccccactcagcagctgacctggtctcgggagtccccgcttaaacccttcttaaaactcagcctggggctgccaggcctgggaatccacatgaggcccctggccatctggcttttcatcttcaacgtctctcaacagatggggggcttctacctgtgccagccggggcccccctctgagaaggcctggcagcctggctggacagtcaatgtggagggcagcggggggggaggtgggtctggaggtggaggatctggtggaggtgggtctggtggaggtgggtctgaggtgcagctggtggagtctggtggtggtcttgttcaacctggtggttctcttcgtctttcttgtgctgcttctggttttaatattaaagatacttatattcattgggttcgtcaagctcctggtaaaggtcttgaatgggttgctcgtatttatcctactaatggttatactcgttatgctgattctgttaaaggtcgttttactatttctgctgatacttctaaaaatactgcttatcttcaaatgaactctcttcgtgctgaagatactgctgtttattattgttctcgttggggtggtgatggtttttatgctatggattattggggtcaaggtactcttgtcaccgtctcctcagctagcaccgggggaggtgggtctggaggtggaggatctggtggaggtgggtctgacatccagatgacccagtctccttcttctctttctgcttctgttggtgatcgtgttactattacttgtcgtgcttctcaagatgttaatactgctgttgcttggtatcaacaaaaacctggtaaagctcctaaacttcttatttattctgcttcttttctttattctggtgttccttctcgtttttctggttctcgttctggtactgattttactcttactatttcttctcttcaacctgaagattttgctacttattattgtcaacaacattatactactcctcctacttttggtcaaggtaccaaggtggagatcaaacgtacgtctagagggccccatcatcaccatcaccat

SEQ ID NO: 227 - DNA, 1836 bp, Artificial Sequence
  Description of Artificial Sequence: Synthetic polynucleotide
atgccacctcctcgcctcctcttcttcctcctcttcctcacccccatggaagtcaggcccgaggaacctctagtggtgaaggtggaagagggagataacgctgtgctgcagtgcctcaaggggacctcagatggccccactcagcagctgacctggtctcgggagtccccgcttaaacccttcttaaaactcagcctggggctgccaggcctgggaatccacatgaggcccctggccatctggcttttcatcttcaacgtctctcaacagatggggggcttctacctgtgccagccggggcccccctctgagaaggcctggcagcctggctggacagtcaatgtggagggcagcggggggggaggtgggtctggaggtggaggatctggtggaggtgggtctggtggaggtgggtctgaggtgcagctggtggagtctggtggtggtcttgttcaacctggtggttctcttcgtctttcttgtgctgcttctggttttaatattaaagatacttatattcattgggttcgtcaagctcctggtaaaggtcttgaatgggttgctcgtatttatcctactaatggttatactcgttatgctgattctgttaaaggtcgttttactatttctgctgatacttctaaaaatactgcttatcttcaaatgaactctcttcgtgctgaagatactgctgtttattattgttctcgttggggtggtgatggtttttatgctatggattattggggtcaaggtactcttgtcaccgtctcctcagctagcaccgggggaggtgggtctggaggtggaggatctggtggaggtgggtctgacatccagatgacccagtctccttcttctctttctgcttctgttggtgatcgtgttactattacttgtcgtgcttctcaagatgttaatactgctgttgcttggtatcaacaaaaacctggtaaagctcctaaacttcttatttattctgcttcttttctttattctggtgttccttctcgtttttctggttctcgttctggtactgattttactcttactatttcttctcttcaacctgaagattttgctacttattattgtcaacaacattatactactcctcctacttttggtcaaggtaccaaggtggagatcaaacgtacggacaaaactcacacatgcccaccgtgcccagcacctgaactcctggggggaccgtcagtcttcctcttccccccaaaacccaaggacaccctcatgatctcccggacccctgaggtcacatgcgtggtggtggacgtgagccacgaagaccctgaggtcaagttcaactggtacgtggacggcgtggaggtgcataatgccaagacaaagccgcgggaggagcagtacaacagcacgtaccgtgtggtcagcgtcctcaccgtcctgcaccaggactggctgaatggcaaggagtacaagtgcaaggtctccaacaaagccctcccagcccccatcgagaaaaccatctccaaagccaaagggcagccccgagaaccacaggtgtacaccctgcccccatcccgggaggagatgaccaagaaccaggtcagcctgacctgcctggtcaaaggcttctatcccagcgacatcgccgtggagtgggagagcaatgggcagccggagaacaactacaagaccacgcctcccgtgctggactccgacggctccttcttcctctacagcaagctcaccgtggacaagagcaggtggcagcaggggaacgtcttctcatgctccgtgatgcacgaggctctgcacaaccactacacgcagaagagcctctccctgtctccgggt

SEQ ID NO: 228 - DNA, 852 bp, Artificial Sequence
  Description of Artificial Sequence: Synthetic polynucleotide
atgccacctcctcgcctcctcttcttcctcctcttcctcacccccatggaagtcaggcccgaggaacctctagtggtgaaggtggaagagggagataacgctgtgctgcagtgcctcaaggggacctcagatggccccactcagcagctgacctggtctcgggagtccccgcttaaacccttcttaaaactcagcctggggctgccaggcctgggaatccacatgaggcccctggccatctggcttttcatcttcaacgtctctcaacagatggggggcttctacctgtgccagccggggcccccctctgagaaggcctggcagcctggctggacagtcaatgtggagggcagcggggagctgttccggtggaatgtttcggacctaggtggcctgggctgtggcctgaagaacaggtcctcagagggccccagctccccttccgggaagctcatgagccccaagctgtatgtgtgggccaaagaccgccctgagatctgggagggagagcctccgtgtctcccaccgagggacagcctgaaccagagcctcagccaggacctcaccatggcccctggctccacactctggctgtcctgtggggtaccccctgactctgtgtccaggggccccctctcctggacccatgtgcaccccaaggggcctaagtcattgctgagcctagagctgaaggacgatcgcccggccagagatatgtgggtaatggagacgggtctgttgttgccccgggccacagctcaagacgctggaaagtattattgtcaccgtggcaacctgaccatgtcattccacctggagatcactgctcggccacatcatcaccatcaccat

SEQ ID NO: 229 - DNA, 1512 bp, Artificial Sequence
  Description of Artificial Sequence: Synthetic polynucleotide
atgccacctcctcgcctcctcttcttcctcctcttcctcacccccatggaagtcaggcccgaggaacctctagtggtgaaggtggaagagggagataacgctgtgctgcagtgcctcaaggggacctcagatggccccactcagcagctgacctggtctcgggagtccccgcttaaacccttcttaaaactcagcctggggctgccaggcctgggaatccacatgaggcccctggccatctggcttttcatcttcaacgtctctcaacagatggggggcttctacctgtgccagccggggcccccctctgagaaggcctggcagcctggctggacagtcaatgtggagggcagcggggagctgttccggtggaatgtttcggacctaggtggcctgggctgtggcctgaagaacaggtcctcagagggccccagctccccttccgggaagctcatgagccccaagctgtatgtgtgggccaaagaccgccctgagatctgggagggagagcctccgtgtctcccaccgagggacagcctgaaccagagcctcagccaggacctcaccatggcccctggctccacactctggctgtcctgtggggtaccccctgactctgtgtccaggggccccctctcctggacccatgtgcaccccaaggggcctaagtcattgctgagcctagagctgaaggacgatcgcccggccagagatatgtgggtaatggagacgggtctgttgttgccccgggccacagctcaagacgctggaaagtattattgtcaccgtggcaacctgaccatgtcattccacctggagatcactgctcggccagacaaaactcacacatgcccaccgtgcccagcacctgaactcctggggggaccgtcagtcttcctcttccccccaaaacccaaggacaccctcatgatctcccggacccctgaggtcacatgcgtggtggtggacgtgagccacgaagaccctgaggtcaagttcaactggtacgtggacggcgtggaggtgcataatgccaagacaaagccgcgggaggagcagtacaacagcacgtaccgtgtggtcagcgtcctcaccgtcctgcaccaggactggctgaatggcaaggagtacaagtgcaaggtctccaacaaagccctcccagcccccatcgagaaaaccatctccaaagccaaagggcagccccgagaaccacaggtgtacaccctgcccccatcccgggaggagatgaccaagaaccaggtcagcctgacctgcctggtcaaaggcttctatcccagcgacatcgccgtggagtgggagagcaatgggcagccggagaacaactacaagaccacgcctcccgtgctggactccgacggctccttcttcctctacagcaagctcaccgtggacaagagcaggtggcagcaggggaacgtcttctcatgctccgtgatgcacgaggctctgcacaaccactacacgcagaagagcctctccctgtctccgggt

SEQ ID NO: 230 - DNA, 384 bp, Artificial Sequence
  Description of Artificial Sequence: Synthetic polynucleotide
atgccacctcctcgcctcctcttcttcctcctcttcctcacccccatggaagtcaggccgagggacagcctgaaccagagcctcagccaggacctcaccatggcccctggctccacactctggctgtcctgtggggtaccccctgactctgtgtccaggggccccctctcctggacccatgtgcaccccaaggggcctaagtcattgctgagcctagagctgaaggacgatcgcccggccagagatatgtgggtaatggagacgggtctgttgttgccccgggccacagctcaagacgctggaaagtattattgtcaccgtggcaacctgaccatgtcattccacctggagatcactgctcggccacatcatcaccatcaccat

SEQ ID NO: 231 - DNA, 1044 bp, Artificial Sequence
  Description of Artificial Sequence: Synthetic polynucleotide
atgccacctcctcgcctcctcttcttcctcctcttcctcacccccatggaagtcaggccgagggacagcctgaaccagagcctcagccaggacctcaccatggcccctggctccacactctggctgtcctgtggggtaccccctgactctgtgtccaggggccccctctcctggacccatgtgcaccccaaggggcctaagtcattgctgagcctagagctgaaggacgatcgcccggccagagatatgtgggtaatggagacgggtctgttgttgccccgggccacagctcaagacgctggaaagtattattgtcaccgtggcaacctgaccatgtcattccacctggagatcactgctcggccagacaaaactcacacatgcccaccgtgcccagcacctgaactcctggggggaccgtcagtcttcctcttccccccaaaacccaaggacaccctcatgatctcccggacccctgaggtcacatgcgtggtggtggacgtgagccacgaagaccctgaggtcaagttcaactggtacgtggacggcgtggaggtgcataatgccaagacaaagccgcgggaggagcagtacaacagcacgtaccgtgtggtcagcgtcctcaccgtcctgcaccaggactggctgaatggcaaggagtacaagtgcaaggtctccaacaaagccctcccagcccccatcgagaaaaccatctccaaagccaaagggcagccccgagaaccacaggtgtacaccctgcccccatcccgggaggagatgaccaagaaccaggtcagcctgacctgcctggtcaaaggcttctatcccagcgacatcgccgtggagtgggagagcaatgggcagccggagaacaactacaagaccacgcctcccgtgctggactccgacggctccttcttcctctacagcaagctcaccgtggacaagagcaggtggcagcaggggaacgtcttctcatgctccgtgatgcacgaggctctgcacaaccactacacgcagaagagcctctccctgtctccgggt

SEQ ID NO: 232 - DNA, 1521 bp, Artificial Sequence
  Description of Artificial Sequence: Synthetic polynucleotide
atgccacctcctcgcctcctcttcttcctcctcttcctcacccccatggaagtcaggcccgaggaacctctagtggtgaaggtggaagagggagataacgctgtgctgcagtgcctcaaggggacctcagatggccccactcagcagctgacctggtctcgggagtccccgcttaaacccttcttaaaactcagcctggggctgccaggcctgggaatccacatgaggcccctggccatctggcttttcatcttcaacgtctctcaacagatggggggcttctacctgtgccagccggggcccccctctgagaaggcctggcagcctggctggacagtcaatgtggagggcagcggggagctgttccggtggaatgtttcggacctaggtggcctgggctgtggcctgaagaacaggtcctcagagggccccagctccccttccgggaagctcatgagccccaagctgtatgtgtgggccaaagaccgccctgagatctgggagggagagcctccgtgtctcccaccgagggacagcctgaaccagagcctcagccaggacctcaccatggcccctggctccacactctggctgtcctgtggggtaccccctgactctgtgtccaggggccccctctcctggacccatgtgcaccccaaggggcctaagtcattgctgagcctagagctgaaggacgatcgcccggccagagatatgtgggtaatggagacgggtctgttgttgccccgggccacagctcaagacgctggaaagtattattgtcaccgtggcaacctgaccatgtcattccacctggagatcactgctcggccaggaggaggtgggtctggaggtggaggatctggtggaggtgggtctgacatccagatgacccagtctccatcctccctgtctgcatctgtaggagacagagtcaccatcacttgccaggcgagtcaggacatcagcaactatttaaattggtatcagcagaaaccagggaaagcccctaaactcctgatctacgatgcatccaatttggaaacaggggtcccatcaaggttcagtggaagtggatctgggacagattttactttcaccatcagcagcctgcagcctgaagatattgcaacatatttctgtcaacactttgatcatctcccgctcgctttcggcggagggaccaaggtggagatcaaacgaactgtggctgcaccatctgtcttcatcttcccgccatctgatgagcagttgaaatctggaactgcctctgttgtgtgcctgctgaataacttctatcccagagaggccaaagtacagtggaaggtggataacgccctccaatcgggtaactcccaggagagtgtcacagagcaggacagcaaggacagcacctacagcctcagcagcaccctgacgctgagcaaagcagactacgagaaacacaaagtctacgcctgcgaagtcacccatcagggcctgagctcgcccgtcacaaagagcttcaacaggggagagtgt

SEQ ID NO: 233 - DNA, 2211 bp, Artificial Sequence
  Description of Artificial Sequence: Synthetic polynucleotide
atgccacctcctcgcctcctcttcttcctcctcttcctcacccccatggaagtcaggcccgaggaacctctagtggtgaaggtggaagagggagataacgctgtgctgcagtgcctcaaggggacctcagatggccccactcagcagctgacctggtctcgggagtccccgcttaaacccttcttaaaactcagcctggggctgccaggcctgggaatccacatgaggcccctggccatctggcttttcatcttcaacgtctctcaacagatggggggcttctacctgtgccagccggggcccccctctgagaaggcctggcagcctggctggacagtcaatgtggagggcagcggggagctgttccggtggaatgtttcggacctaggtggcctgggctgtggcctgaagaacaggtcctcagagggccccagctccccttccgggaagctcatgagccccaagctgtatgtgtgggccaaagaccgccctgagatctgggagggagagcctccgtgtctcccaccgagggacagcctgaaccagagcctcagccaggacctcaccatggcccctggctccacactctggctgtcctgtggggtaccccctgactctgtgtccaggggccccctctcctggacccatgtgcaccccaaggggcctaagtcattgctgagcctagagctgaaggacgatcgcccggccagagatatgtgggtaatggagacgggtctgttgttgccccgggccacagctcaagacgctggaaagtattattgtcaccgtggcaacctgaccatgtcattccacctggagatcactgctcggccaggaggaggtgggtctggaggtggaggatctggtggaggtgggtctcaggtgcagctgcaggagtcgggcccaggactggtgaagccttcggagaccctgtccctcacctgcactgtctctggtggctccgtcagcagtggtgattactactggacctggatccggcagtccccagggaagggactggagtggattggacacatctattacagtgggaacaccaattataacccctccctcaagagtcgactcaccatatcaattgacacgtccaagactcagttctccctgaagctgagttctgtgaccgctgcggacacggccatttattactgtgtgcgagatcgagtgactggtgcttttgatatctggggccaagggacaatggtcaccgtctcttcagcctccaccaagggcccatcggtcttccccctggcgccctgctccaggagcacctccgagagcacagcggccctgggctgcctggtcaaggactacttccctgaaccggtgacggtgtcgtggaactcaggcgctctgaccagcggcgtgcacaccttcccggctgtcctacagtcctcaggactctactccctcagcagcgtggtgaccgtgccctccagcaacttcggcacccagacctacacctgcaacgtagatcacaagcccagcaataccaaggtggacaagacagttgagcgcaaatgttgtgtcgagtgcccaccgtgcccagcaccacctgtggcaggaccgtcagtcttcctcttccccccaaaacccaaggacaccctcatgatctcccggacccctgaggtcacgtgcgtggtggtggacgtgagccacgaagaccccgaggtccagttcaactggtacgtggacggcgtggaggtgcataatgccaagacaaagccacgggaggagcagttccaaagcacgttccgtgtggtcagcgtcctcaccgtcgtgcaccaggactggctgaacggcaaggagtacaagtgcaaggtctccaacaaaggcctcccagcccccatcgagaaaaccatctccaaaaccaaagggcagccccgagaaccacaggtgtacaccctgcccccatcccgggaggagatgaccaagaaccaggtcagcctgacctgcctggtcaaaggcttctaccccagcgacatcgccgtggagtgggagagcaatgggcagccggagaacaactacaagaccacgcctcccatgctggactccgacggctccttcttcctctacagcaagctcaccgtggacaagagcaggtggcagcaggggaacgtcttctcatgctccgtgatgcatgaggctctgcacaaccactacacgcagaagagcctctccctgtctccgggt

SEQ ID NO: 234 - DNA, 1536 bp, Artificial Sequence
  Description of Artificial Sequence: Synthetic polynucleotide
atggagacagacacactcctgctatgggtactgctgctctgggttccaggttccactggtgacatccagatgacccagtctccatcctccctgtctgcatctgtaggagacagagtcaccatcacttgccaggcgagtcaggacatcagcaactatttaaattggtatcagcagaaaccagggaaagcccctaaactcctgatctacgatgcatccaatttggaaacaggggtcccatcaaggttcagtggaagtggatctgggacagattttactttcaccatcagcagcctgcagcctgaagatattgcaacatatttctgtcaacactttgatcatctcccgctcgctttcggcggagggaccaaggtggagatcaaacgaactgtggctgcaccatctgtcttcatcttcccgccatctgatgagcagttgaaatctggaactgcctctgttgtgtgcctgctgaataacttctatcccagagaggccaaagtacagtggaaggtggataacgccctccaatcgggtaactcccaggagagtgtcacagagcaggacagcaaggacagcacctacagcctcagcagcaccctgacgctgagcaaagcagactacgagaaacacaaagtctacgcctgcgaagtcacccatcagggcctgagctcgcccgtcacaaagagcttcaacaggggagagtgtgacaaaactcacacatcgccaccgtccccagcacctgaagccgcggggggaccgtcacccgaggaacctctagtggtgaaggtggaagagggagataacgctgtgctgcagtgcctcaaggggacctcagatggccccactcagcagctgacctggtctcgggagtccccgcttaaacccttcttaaaactcagcctggggctgccaggcctgggaatccacatgaggcccctggccatctggcttttcatcttcaacgtctctcaacagatggggggcttctacctgtgccagccggggcccccctctgagaaggcctggcagcctggctggacagtcaatgtggagggcagcggggagctgttccggtggaatgtttcggacctaggtggcctgggctgtggcctgaagaacaggtcctcagagggccccagctccccttccgggaagctcatgagccccaagctgtatgtgtgggccaaagaccgccctgagatctgggagggagagcctccgtgtctcccaccgagggacagcctgaaccagagcctcagccaggacctcaccatggcccctggctccacactctggctgtcctgtggggtaccccctgactctgtgtccaggggccccctctcctggacccatgtgcaccccaaggggcctaagtcattgctgagcctagagctgaaggacgatcgcccggccagagatatgtgggtaatggagacgggtctgttgttgccccgggccacagctcaagacgctggaaagtattattgtcaccgtggcaacctgaccatgtcattccacctggagatcactgctcggcca

SEQ ID NO: 235 - DNA, 2211 bp, Artificial Sequence
  Description of Artificial Sequence: Synthetic polynucleotide
atggagtttgggctgagctgggttttcctcgttgctctttttagaggtgtccagtgtcaggtgcagctgcaggagtcgggcccaggactggtgaagccttcggagaccctgtccctcacctgcactgtctctggtggctccgtcagcagtggtgattactactggacctggatccggcagtccccagggaagggactggagtggattggacacatctattacagtgggaacaccaattataacccctccctcaagagtcgactcaccatatcaattgacacgtccaagactcagttctccctgaagctgagttctgtgaccgctgcggacacggccatttattactgtgtgcgagatcgagtgactggtgcttttgatatctggggccaagggacaatggtcaccgtctcttcagcctccaccaagggcccatcggtcttccccctggcgccctgctccaggagcacctccgagagcacagcggccctgggctgcctggtcaaggactacttccctgaaccggtgacggtgtcgtggaactcaggcgctctgaccagcggcgtgcacaccttcccggctgtcctacagtcctcaggactctactccctcagcagcgtggtgaccgtgccctccagcaacttcggcacccagacctacacctgcaacgtagatcacaagcccagcaataccaaggtggacaagacagttgagcgcaaatgttgtgtcgagtgcccaccgtgcccagcaccacctgtggcaggaccgtcagtcttcctcttccccccaaaacccaaggacaccctcatgatctcccggacccctgaggtcacgtgcgtggtggtggacgtgagccacgaagaccccgaggtccagttcaactggtacgtggacggcgtggaggtgcataatgccaagacaaagccacgggaggagcagttccaaagcacgttccgtgtggtcagcgtcctcaccgtcgtgcaccaggactggctgaacggcaaggagtacaagtgcaaggtctccaacaaaggcctcccagcccccatcgagaaaaccatctccaaaaccaaagggcagccccgagaaccacaggtgtacaccctgcccccatcccgggaggagatgaccaagaaccaggtcagcctgacctgcctggtcaaaggcttctaccccagcgacatcgccgtggagtgggagagcaatgggcagccggagaacaactacaagaccacgcctcccatgctggactccgacggctccttcttcctctacagcaagctcaccgtggacaagagcaggtggcagcaggggaacgtcttctcatgctccgtgatgcatgaggctctgcacaaccactacacgcagaagagcctctccctgtctccgggtggtggaggtgggtctggaggtggaggatctggtggaggtgggtctcccgaggaacctctagtggtgaaggtggaagagggagataacgctgtgctgcagtgcctcaaggggacctcagatggccccactcagcagctgacctggtctcgggagtccccgcttaaacccttcttaaaactcagcctggggctgccaggcctgggaatccacatgaggcccctggccatctggcttttcatcttcaacgtctctcaacagatggggggcttctacctgtgccagccggggcccccctctgagaaggcctggcagcctggctggacagtcaatgtggagggcagcggggagctgttccggtggaatgtttcggacctaggtggcctgggctgtggcctgaagaacaggtcctcagagggccccagctccccttccgggaagctcatgagccccaagctgtatgtgtgggccaaagaccgccctgagatctgggagggagagcctccgtgtctcccaccgagggacagcctgaaccagagcctcagccaggacctcaccatggcccctggctccacactctggctgtcctgtggggtaccccctgactctgtgtccaggggccccctctcctggacccatgtgcaccccaaggggcctaagtcattgctgagcctagagctgaaggacgatcgcccggccagagatatgtgggtaatggagacgggtctgttgttgccccgggccacagctcaagacgctggaaagtattattgtcaccgtggcaacctgaccatgtcattccacctggagatcactgctcggcca

SEQ ID NO: 236 - DNA, 1525 bp, Artificial Sequence
  Description of Artificial Sequence: Synthetic polynucleotide
atgccacctcctcgcctcctcttcttcctcctcttcctcacccccatggaagtcaggcccgaggaacctctagtggtgaaggtggaagagggagataacgctgtgctgcagtgcctcaaggggacctcagatggccccactcagcagctgacctggtctcgggagtccccgcttaaacccttcttaaaactcagcctggggctgccaggcctgggaatccacatgaggcccctggccatctggcttttcatcttcaacgtctctcaacagatggggggcttctacctgtgccagccggggcccccctctgagaaggcctggcagcctggctggacagtcaatgtggagggcagcggggagctgttccggtggaatgtttcggacctaggtggcctgggctgtggcctgaagaacaggtcctcagagggccccagctccccttccgggaagctcatgagccccaagctgtatgtgtgggccaaagaccgccctgagatctgggagggagagcctccgtgtctcccaccgagggacagcctgaaccagagcctcagccaggacctcaccatggcccctggctccacactctggctgtcctgtggggtaccccctgactctgtgtccaggggccccctctcctggacccatgtgcaccccaaggggcctaagtcattgctgagcctagagctgaaggacgatcgcccggccagagatatgtgggtaatggagacgggtctgttgttgccccgggccacagctcaagacgctggaaagtattattgtcaccgtggcaacctgaccatgtcattccacctggagatcactgctcggccaggaggaggtgggtctggaggtggaggatctggtggaggtgggtctgacatccagatgacccagtctccatcctccctgtctgcatctgtaggagacagagtcaccatcacttgcagtgtcagctcaagtgtatcctccatttacttgcactggtatcagcagaaaccagggaaagcccctaagctcctgatctatagcacatccaacttggcttctggagtcccatcaaggttcagtggcagtggatctgggacagatttcactctcaccatcagcagtctgcaacctgaagattttgcaacttactactgtcaagtctacagtggttacccgctcacgttcggcggagggaccaaggtggagatcaaacgaactgtggctgcaccatctgtcttcatcttcccgccatctgatgagcagttgaaatctggaactgcctctgttgtgtgcctgctgaataacttctatcccagagaggccaaagtacagtggaaggtggataacgccctccaatcgggtaactcccaggagagtgtcacagagcaggacagcaaggacagcacctacagcctcagcagcaccctgacgctgagcaaagcagactacgagaaacacaaagtctacgcctgcgaagtcacccatcagggcctgagctcgcccgtcacaaagagcttcaacaggggagagtgct

SEQ ID NO: 237 - DNA, 2199 bp, Artificial Sequence
  Description of Artificial Sequence: Synthetic polynucleotide
atgccacctcctcgcctcctcttcttcctcctcttcctcacccccatggaagtcaggcccgaggaacctctagtggtgaaggtggaagagggagataacgctgtgctgcagtgcctcaaggggacctcagatggccccactcagcagctgacctggtctcgggagtccccgcttaaacccttcttaaaactcagcctggggctgccaggcctgggaatccacatgaggcccctggccatctggcttttcatcttcaacgtctctcaacagatggggggcttctacctgtgccagccggggcccccctctgagaaggcctggcagcctggctggacagtcaatgtggagggcagcggggagctgttccggtggaatgtttcggacctaggtggcctgggctgtggcctgaagaacaggtcctcagagggccccagctccccttccgggaagctcatgagccccaagctgtatgtgtgggccaaagaccgccctgagatctgggagggagagcctccgtgtctcccaccgagggacagcctgaaccagagcctcagccaggacctcaccatggcccctggctccacactctggctgtcctgtggggtaccccctgactctgtgtccaggggccccctctcctggacccatgtgcaccccaaggggcctaagtcattgctgagcctagagctgaaggacgatcgcccggccagagatatgtgggtaatggagacgggtctgttgttgccccgggccacagctcaagacgctggaaagtattattgtcaccgtggcaacctgaccatgtcattccacctggagatcactgctcggccaggaggaggtgggtctggaggtggaggatctggtggaggtgggtctcaggttcagctggtgcagtctggtgctgaggtgaagaagcctggtgcctcagtgaaggtctcctgcaaggcttctggttacacattcactgactactacatgcactgggtgcgtcaggcccctggtcaaggtcttgagtggatgggtcgtgttaatcctaaccggaggggtactacctacaaccagaaattcgagggccgtgtcaccatgaccacagacacatccacgagcacagcctacatggagctgcgtagcctgcgttctgacgacacggccgtgtattactgtgcgcgtgcgaactggcttgactactggggccagggcaccaccgtcaccgtctcctccgcctccaccaagggcccatcggtcttcccgctagcgccctgctccaggagcacctccgagagcacagccgccctgggctgcctggtcaaggactacttccccgaaccggtgacggtgtcgtggaactcaggcgccctgaccagcggcgtgcacaccttcccggctgtcctacagtcctcaggactctactccctcagcagcgtggtgaccgtgccctccagcagcttgggcacgaagacctacacctgcaacgtagatcacaagcccagcaacaccaaggtggacaagagagttgagtccaaatatggtcccccatgcccaccctgcccagcacctgaggccgccgggggaccatcagtcttcctgttccccccaaaacccaaggacactctcatgatctcccggacccctgaggtcacgtgcgtggtggtggacgtgagccaggaagaccccgaggtccagttcaactggtacgtggatggcgtggaggtgcataatgccaagacaaagccgcgggaggagcagttcaacagcacgtaccgtgtggtcagcgtcctcaccgtcctgcaccaggactggctgaacggcaaggagtacaagtgcaaggtctccaacaaaggcctcccgtcctccatcgagaaaaccatctccaaagccaaagggcagccccgagagccacaggtgtacaccctgcccccatcccaggaggagatgaccaagaaccaggtcagcctgacctgcctggtcaaaggcttctaccccagcgacatcgccgtggagtgggaaagcaatgggcagccggagaacaactacaagaccacgcctcccgtgctggactccgacggctccttcttcctctacagcaggctaaccgtggacaagagcaggtggcaggaggggaatgtcttctcatgctccgtgatgcatgaggctctgcacaaccactacacacagaagagcctctccctgtctctg

SEQ ID NO: 238 - DNA, 1539 bp, Artificial Sequence
  Description of Artificial Sequence: Synthetic polynucleotide
atggagacagacacactcctgctatgggtactgctgctctgggttccaggttccactggtgacatccagatgacccagtctccatcctccctgtctgcatctgtaggagacagagtcaccatcacttgcagtgtcagctcaagtgtatcctccatttacttgcactggtatcagcagaaaccagggaaagcccctaagctcctgatctatagcacatccaacttggcttctggagtcccatcaaggttcagtggcagtggatctgggacagatttcactctcaccatcagcagtctgcaacctgaagattttgcaacttactactgtcaagtctacagtggttacccgctcacgttcggcggagggaccaaggtggagatcaaacgaactgtggctgcaccatctgtcttcatcttcccgccatctgatgagcagttgaaatctggaactgcctctgttgtgtgcctgctgaataacttctatcccagagaggccaaagtacagtggaaggtggataacgccctccaatcgggtaactcccaggagagtgtcacagagcaggacagcaaggacagcacctacagcctcagcagcaccctgacgctgagcaaagcagactacgagaaacacaaagtctacgcctgcgaagtcacccatcagggcctgagctcgcccgtcacaaagagcttcaacaggggagagtgcgacaaaactcacacatcgccaccgtccccagcacctgaagccgcggggggaccgtcacccgaggaacctctagtggtgaaggtggaagagggagataacgctgtgctgcagtgcctcaaggggacctcagatggccccactcagcagctgacctggtctcgggagtccccgcttaaacccttcttaaaactcagcctggggctgccaggcctgggaatccacatgaggcccctggccatctggcttttcatcttcaacgtctctcaacagatggggggcttctacctgtgccagccggggcccccctctgagaaggcctggcagcctggctggacagtcaatgtggagggcagcggggagctgttccggtggaatgtttcggacctaggtggcctgggctgtggcctgaagaacaggtcctcagagggccccagctccccttccgggaagctcatgagccccaagctgtatgtgtgggccaaagaccgccctgagatctgggagggagagcctccgtgtctcccaccgagggacagcctgaaccagagcctcagccaggacctcaccatggcccctggctccacactctggctgtcctgtggggtaccccctgactctgtgtccaggggccccctctcctggacccatgtgcaccccaaggggcctaagtcattgctgagcctagagctgaaggacgatcgcccggccagagatatgtgggtaatggagacgggtctgttgttgccccgggccacagctcaagacgctggaaagtattattgtcaccgtggcaacctgaccatgtcattccacctggagatcactgctcggcca

SEQ ID NO: 239 - DNA, 2202 bp, Artificial Sequence
  Description of Artificial Sequence: Synthetic polynucleotide
atggagtttgggctgagctgggttttcctcgttgctctttttagaggtgtccagtgtcaggttcagctggtgcagtctggtgctgaggtgaagaagcctggtgcctcagtgaaggtctcctgcaaggcttctggttacacattcactgactactacatgcactgggtgcgtcaggcccctggtcaaggtcttgagtggatgggtcgtgttaatcctaaccggaggggtactacctacaaccagaaattcgagggccgtgtcaccatgaccacagacacatccacgagcacagcctacatggagctgcgtagcctgcgttctgacgacacggccgtgtattactgtgcgcgtgcgaactggcttgactactggggccagggcaccaccgtcaccgtctcctccgcctccaccaagggcccatcggtcttcccgctagcgccctgctccaggagcacctccgagagcacagccgccctgggctgcctggtcaaggactacttccccgaaccggtgacggtgtcgtggaactcaggcgccctgaccagcggcgtgcacaccttcccggctgtcctacagtcctcaggactctactccctcagcagcgtggtgaccgtgccctccagcagcttgggcacgaagacctacacctgcaacgtagatcacaagcccagcaacaccaaggtggacaagagagttgagtccaaatatggtcccccatgcccaccctgcccagcacctgaggccgccgggggaccatcagtcttcctgttccccccaaaacccaaggacactctcatgatctcccggacccctgaggtcacgtgcgtggtggtggacgtgagccaggaagaccccgaggtccagttcaactggtacgtggatggcgtggaggtgcataatgccaagacaaagccgcgggaggagcagttcaacagcacgtaccgtgtggtcagcgtcctcaccgtcctgcaccaggactggctgaacggcaaggagtacaagtgcaaggtctccaacaaaggcctcccgtcctccatcgagaaaaccatctccaaagccaaagggcagccccgagagccacaggtgtacaccctgcccccatcccaggaggagatgaccaagaaccaggtcagcctgacctgcctggtcaaaggcttctaccccagcgacatcgccgtggagtgggaaagcaatgggcagccggagaacaactacaagaccacgcctcccgtgctggactccgacggctccttcttcctctacagcaggctaaccgtggacaagagcaggtggcaggaggggaatgtcttctcatgctccgtgatgcatgaggctctgcacaaccactacacacagaagagcctctccctgtctctgggtggtggaggtgggtctggaggtggaggatctggtggaggtgggtctcccgaggaacctctagtggtgaaggtggaagagggagataacgctgtgctgcagtgcctcaaggggacctcagatggccccactcagcagctgacctggtctcgggagtccccgcttaaacccttcttaaaactcagcctggggctgccaggcctgggaatccacatgaggcccctggccatctggcttttcatcttcaacgtctctcaacagatggggggcttctacctgtgccagccggggcccccctctgagaaggcctggcagcctggctggacagtcaatgtggagggcagcggggagctgttccggtggaatgtttcggacctaggtggcctgggctgtggcctgaagaacaggtcctcagagggccccagctccccttccgggaagctcatgagccccaagctgtatgtgtgggccaaagaccgccctgagatctgggagggagagcctccgtgtctcccaccgagggacagcctgaaccagagcctcagccaggacctcaccatggcccctggctccacactctggctgtcctgtggggtaccccctgactctgtgtccaggggccccctctcctggacccatgtgcaccccaaggggcctaagtcattgctgagcctagagctgaaggacgatcgcccggccagagatatgtgggtaatggagacgggtctgttgttgccccgggccacagctcaagacgctggaaagtattattgtcaccgtggcaacctgaccatgtcattccacctggagatcactgctcggcca

SEQ ID NO: 240 - DNA, 1662 bp, Artificial Sequence
  Description of Artificial Sequence: Synthetic polynucleotide
atggagtttgggctgagctgggttttcctcgttgctctttttagaggtgtccagtgtgaggtgcagctggtggagtctggtggtggtcttgttcaacctggtggttctcttcgtctttcttgtgctgcttctggttttaatattaaagatacttatattcattgggttcgtcaagctcctggtaaaggtcttgaatgggttgctcgtatttatcctactaatggttatactcgttatgctgattctgttaaaggtcgttttactatttctgctgatacttctaaaaatactgcttatcttcaaatgaactctcttcgtgctgaagatactgctgtttattattgttctcgttggggtggtgatggtttttatgctatggattattggggtcaaggtactcttgtcaccgtctcctcagctagcaccgggggaggtgggtctggaggtggaggatctggtggaggtgggtctgacatccagatgacccagtctccttcttctctttctgcttctgttggtgatcgtgttactattacttgtcgtgcttctcaagatgttaatactgctgttgcttggtatcaacaaaaacctggtaaagctcctaaacttcttatttattctgcttcttttctttattctggtgttccttctcgtttttctggttctcgttctggtactgattttactcttactatttcttctcttcaacctgaagattttgctacttattattgtcaacaacattatactactcctcctacttttggtcaaggtaccaaggtggagatcaaacgtacggacaaaactcacacatcgccaccgtccccagcacctgaagccgcggggggaccgtcacccgaggaacctctagtggtgaaggtggaagagggagataacgctgtgctgcagtgcctcaaggggacctcagatggccccactcagcagctgacctggtctcgggagtccccgcttaaacccttcttaaaactcagcctggggctgccaggcctgggaatccacatgaggcccctggccatctggcttttcatcttcaacgtctctcaacagatggggggcttctacctgtgccagccggggcccccctctgagaaggcctggcagcctggctggacagtcaatgtggagggcagcggggagctgttccggtggaatgtttcggacctaggtggcctgggctgtggcctgaagaacaggtcctcagagggccccagctccccttccgggaagctcatgagccccaagctgtatgtgtgggccaaagaccgccctgagatctgggagggagagcctccgtgtctcccaccgagggacagcctgaaccagagcctcagccaggacctcaccatggcccctggctccacactctggctgtcctgtggggtaccccctgactctgtgtccaggggccccctctcctggacccatgtgcaccccaaggggcctaagtcattgctgagcctagagctgaaggacgatcgcccggccagagatatgtgggtaatggagacgggtctgttgttgccccgggccacagctcaagacgctggaaagtattattgtcaccgtggcaacctgaccatgtcattccacctggagatcactgctcggccatctagagggccccatcatcaccatcaccat

SEQ ID NO: 241 - DNA, 2310 bp, Artificial Sequence
  Description of Artificial Sequence: Synthetic polynucleotide
atggagtttgggctgagctgggttttcctcgttgctctttttagaggtgtccagtgtgaggtgcagctggtggagtctggtggtggtcttgttcaacctggtggttctcttcgtctttcttgtgctgcttctggttttaatattaaagatacttatattcattgggttcgtcaagctcctggtaaaggtcttgaatgggttgctcgtatttatcctactaatggttatactcgttatgctgattctgttaaaggtcgttttactatttctgctgatacttctaaaaatactgcttatcttcaaatgaactctcttcgtgctgaagatactgctgtttattattgttctcgttggggtggtgatggtttttatgctatggattattggggtcaaggtactcttgtcaccgtctcctcagctagcaccgggggaggtgggtctggaggtggaggatctggtggaggtgggtctgacatccagatgacccagtctccttcttctctttctgcttctgttggtgatcgtgttactattacttgtcgtgcttctcaagatgttaatactgctgttgcttggtatcaacaaaaacctggtaaagctcctaaacttcttatttattctgcttcttttctttattctggtgttccttctcgtttttctggttctcgttctggtactgattttactcttactatttcttctcttcaacctgaagattttgctacttattattgtcaacaacattatactactcctcctacttttggtcaaggtaccaaggtggagatcaaacgtacggacaaaactcacacatcgccaccgtccccagcacctgaagccgcggggggaccgtcacccgaggaacctctagtggtgaaggtggaagagggagataacgctgtgctgcagtgcctcaaggggacctcagatggccccactcagcagctgacctggtctcgggagtccccgcttaaacccttcttaaaactcagcctggggctgccaggcctgggaatccacatgaggcccctggccatctggcttttcatcttcaacgtctctcaacagatggggggcttctacctgtgccagccggggcccccctctgagaaggcctggcagcctggctggacagtcaatgtggagggcagcggggagctgttccggtggaatgtttcggacctaggtggcctgggctgtggcctgaagaacaggtcctcagagggccccagctccccttccgggaagctcatgagccccaagctgtatgtgtgggccaaagaccgccctgagatctgggagggagagcctccgtgtctcccaccgagggacagcctgaaccagagcctcagccaggacctcaccatggcccctggctccacactctggctgtcctgtggggtaccccctgactctgtgtccaggggccccctctcctggacccatgtgcaccccaaggggcctaagtcattgctgagcctagagctgaaggacgatcgcccggccagagatatgtgggtaatggagacgggtctgttgttgccccgggccacagctcaagacgctggaaagtattattgtcaccgtggcaacctgaccatgtcattccacctggagatcactgctcggccagacaaaactcacacatgcccaccgtgcccagcacctgaactcctggggggaccgtcagtcttcctcttccccccaaaacccaaggacaccctcatgatctcccggacccctgaggtcacatgcgtggtggtggacgtgagccacgaagaccctgaggtcaagttcaactggtacgtggacggcgtggaggtgcataatgccaagacaaagccgcgggaggagcagtacaacagcacgtaccgtgtggtcagcgtcctcaccgtcctgcaccaggactggctgaatggcaaggagtacaagtgcaaggtctccaacaaagccctcccagcccccatcgagaaaaccatctccaaagccaaagggcagccccgagaaccacaggtgtacaccctgcccccatcccgggaggagatgaccaagaaccaggtcagcctgacctgcctggtcaaaggcttctatcccagcgacatcgccgtggagtgggagagcaatgggcagccggagaacaactacaagaccacgcctcccgtgctggactccgacggctccttcttcctctacagcaagctcaccgtggacaagagcaggtggcagcaggggaacgtcttctcatgctccgtgatgcacgaggctctgcacaaccactacacgcagaagagcctctccctgtctccgggt

SEQ ID NO: 242 - DNA, 1665 bp, Artificial Sequence
  Description of Artificial Sequence: Synthetic polynucleotide
atgccacctcctcgcctcctcttcttcctcctcttcctcacccccatggaagtcaggcccgaggaacctctagtggtgaaggtggaagagggagataacgctgtgctgcagtgcctcaaggggacctcagatggccccactcagcagctgacctggtctcgggagtccccgcttaaacccttcttaaaactcagcctggggctgccaggcctgggaatccacatgaggcccctggccatctggcttttcatcttcaacgtctctcaacagatggggggcttctacctgtgccagccggggcccccctctgagaaggcctggcagcctggctggacagtcaatgtggagggcagcggggagctgttccggtggaatgtttcggacctaggtggcctgggctgtggcctgaagaacaggtcctcagagggccccagctccccttccgggaagctcatgagccccaagctgtatgtgtgggccaaagaccgccctgagatctgggagggagagcctccgtgtctcccaccgagggacagcctgaaccagagcctcagccaggacctcaccatggcccctggctccacactctggctgtcctgtggggtaccccctgactctgtgtccaggggccccctctcctggacccatgtgcaccccaaggggcctaagtcattgctgagcctagagctgaaggacgatcgcccggccagagatatgtgggtaatggagacgggtctgttgttgccccgggccacagctcaagacgctggaaagtattattgtcaccgtggcaacctgaccatgtcattccacctggagatcactgctcggccagggggaggtgggtctggaggtggaggatctggtggaggtgggtctggtggaggtgggtctgaggtgcagctggtggagtctggtggtggtcttgttcaacctggtggttctcttcgtctttcttgtgctgcttctggttttaatattaaagatacttatattcattgggttcgtcaagctcctggtaaaggtcttgaatgggttgctcgtatttatcctactaatggttatactcgttatgctgattctgttaaaggtcgttttactatttctgctgatacttctaaaaatactgcttatcttcaaatgaactctcttcgtgctgaagatactgctgtttattattgttctcgttggggtggtgatggtttttatgctatggattattggggtcaaggtactcttgtcaccgtctcctcagctagcaccgggggaggtgggtctggaggtggaggatctggtggaggtgggtctgacatccagatgacccagtctccttcttctctttctgcttctgttggtgatcgtgttactattacttgtcgtgcttctcaagatgttaatactgctgttgcttggtatcaacaaaaacctggtaaagctcctaaacttcttatttattctgcttcttttctttattctggtgttccttctcgtttttctggttctcgttctggtactgattttactcttactatttcttctcttcaacctgaagattttgctacttattattgtcaacaacattatactactcctcctacttttggtcaaggtaccaaggtggagatcaaacgtacgtctagagggccccatcatcaccatcaccat

SEQ ID NO: 243 - DNA, 2313 bp, Artificial Sequence
  Description of Artificial Sequence: Synthetic polynucleotide
atgccacctcctcgcctcctcttcttcctcctcttcctcacccccatggaagtcaggcccgaggaacctctagtggtgaaggtggaagagggagataacgctgtgctgcagtgcctcaaggggacctcagatggccccactcagcagctgacctggtctcgggagtccccgcttaaacccttcttaaaactcagcctggggctgccaggcctgggaatccacatgaggcccctggccatctggcttttcatcttcaacgtctctcaacagatggggggcttctacctgtgccagccggggcccccctctgagaaggcctggcagcctggctggacagtcaatgtggagggcagcggggagctgttccggtggaatgtttcggacctaggtggcctgggctgtggcctgaagaacaggtcctcagagggccccagctccccttccgggaagctcatgagccccaagctgtatgtgtgggccaaagaccgccctgagatctgggagggagagcctccgtgtctcccaccgagggacagcctgaaccagagcctcagccaggacctcaccatggcccctggctccacactctggctgtcctgtggggtaccccctgactctgtgtccaggggccccctctcctggacccatgtgcaccccaaggggcctaagtcattgctgagcctagagctgaaggacgatcgcccggccagagatatgtgggtaatggagacgggtctgttgttgccccgggccacagctcaagacgctggaaagtattattgtcaccgtggcaacctgaccatgtcattccacctggagatcactgctcggccagggggaggtgggtctggaggtggaggatctggtggaggtgggtctggtggaggtgggtctgaggtgcagctggtggagtctggtggtggtcttgttcaacctggtggttctcttcgtctttcttgtgctgcttctggttttaatattaaagatacttatattcattgggttcgtcaagctcctggtaaaggtcttgaatgggttgctcgtatttatcctactaatggttatactcgttatgctgattctgttaaaggtcgttttactatttctgctgatacttctaaaaatactgcttatcttcaaatgaactctcttcgtgctgaagatactgctgtttattattgttctcgttggggtggtgatggtttttatgctatggattattggggtcaaggtactcttgtcaccgtctcctcagctagcaccgggggaggtgggtctggaggtggaggatctggtggaggtgggtctgacatccagatgacccagtctccttcttctctttctgcttctgttggtgatcgtgttactattacttgtcgtgcttctcaagatgttaatactgctgttgcttggtatcaacaaaaacctggtaaagctcctaaacttcttatttattctgcttcttttctttattctggtgttccttctcgtttttctggttctcgttctggtactgattttactcttactatttcttctcttcaacctgaagattttgctacttattattgtcaacaacattatactactcctcctacttttggtcaaggtaccaaggtggagatcaaacgtacggacaaaactcacacatgcccaccgtgcccagcacctgaactcctggggggaccgtcagtcttcctcttccccccaaaacccaaggacaccctcatgatctcccggacccctgaggtcacatgcgtggtggtggacgtgagccacgaagaccctgaggtcaagttcaactggtacgtggacggcgtggaggtgcataatgccaagacaaagccgcgggaggagcagtacaacagcacgtaccgtgtggtcagcgtcctcaccgtcctgcaccaggactggctgaatggcaaggagtacaagtgcaaggtctccaacaaagccctcccagcccccatcgagaaaaccatctccaaagccaaagggcagccccgagaaccacaggtgtacaccctgcccccatcccgggaggagatgaccaagaaccaggtcagcctgacctgcctggtcaaaggcttctatcccagcgacatcgccgtggagtgggagagcaatgggcagccggagaacaactacaagaccacgcctcccgtgctggactccgacggctccttcttcctctacagcaagctcaccgtggacaagagcaggtggcagcaggggaacgtcttctcatgctccgtgatgcacgaggctctgcacaaccactacacgcagaagagcctctccctgtctccgggt

SEQ ID NO: 244-245 - skipped (2 entries)

SEQ ID NO: 246 - DNA, 1083 bp, Artificial Sequence
  Description of Artificial Sequence: Synthetic polynucleotide
aagcttaatttaaggcaggatgtctcagagtctgggaaaatcccactttcctcctgctacaccttacagttgtgagaaagcacatttcagacaacagggaaaacccatacttcaccacaacaacacactatacattgtctggtccactggagcataaattaaagagaaacaatgtagtcaagcaagtaggcggcaagaggaagggggcggagacatcatcagggagtataaactctgagatgcctcagagcctcacagactcaacaagagctccagcaaagactttcactgtagcttgacttgacctgagattaactagggaatcttgagaataaagaagcttaactagttagcggaccgacgcgtacgcggccgctcgagatggagagcgacgagagcggcctgcccgccatggagatcgagtgccgcatcaccggcaccctgaacggcgtggagttcgagctggtgggcggcggagagggcacccccgagcagggccgcatgaccaacaagatgaagagcaccaaaggcgccctgaccttcagcccctacctgctgagccacgtgatgggctacggcttctaccacttcggcacctaccccagcggctacgagaaccccttcctgcacgccatcaacaacggcggctacaccaacacccgcatcgagaagtacgaggacggcggcgtgctgcacgtgagcttcagctaccgctacgaggccggccgcgtgatcggcgacttcaaggtgatgggcaccggcttccccgaggacagcgtgatcttcaccgacaagatcatccgcagcaacgccaccgtggagcacctgcaccccatgggcgataacgatctggatggcagcttcacccgcaccttcagcctgcgcgacggcggctactacagctccgtggtggacagccacatgcacttcaagagcgccatccaccccagcatcctgcagaacgggggccccatgttcgccttccgccgcgtggaggaggatcacagcaacaccgagctgggcatcgtggagtaccagcacgccttcaagaccccggatgcagatgccggtgaagaaagagtt

SEQ ID NO: 247 - DNA, 1790 bp, Artificial Sequence
  Description of Artificial Sequence: Synthetic polynucleotide
aagctttaacgaagacagggccatgtagagggccccagggagtgaaagggcctccaggacctccaggtatggaatacaggggacgtttaagaagatatggccacacactggggccctgagaagtgagagcttcatgaaaaaaatcagggaccccagagttccttggaagccaagactgaaaccagcattatgagtctccgggtcagaatgaaagaagaaggcctgccccagtggggtctgtgaattcccgggggtgatttcactccccggggctgtcccaggcttgtccctgctacccccacccagcctttcctgaggcctcaagcctgccaccaagcccccagctccttctccccgcagggacccaaacacaggcctcgggactcaacacagcttttccctccaaccccgttttctctccctcaaggactcagctttctgaggcccctcccagttctagttctatctttttcctgcatcctgtctggaagttagaaggaaacagaccacagacctggtccccaaaagaaatggaggcaataggttttgaggggcatggggacggggttcagcctccagggtcctacacacaaatcagtcagtggcccagaagaccccctcggaatcggagcagggaggatggggagtgtgaggggtatccttgatgcttgtgtgtccccaactttccaaatccccgcccccgcgatggagaagaaaccgagacagaaggtgcagggcccactaccgcttcctccagatgagctcatgggtttctccaccaaggaagttttccgctggttgaatgattctttccccgccctcctctcgccccagggacatataaaggcagttgttggcacacccagccagcagacgctccctcagcaaggacagcagaggaccagctaagagggagagaagcaactacagaccccccctgaaaacaaccctcagacgccacatcccctgacaagctgccaggcaggttctcttcctctcacatactgacccacggctccaccctctctcccctggaaaggacacaagcttaactagttagcggaccgacgcgtacgcggccgctcgagatggagagcgacgagagcggcctgcccgccatggagatcgagtgccgcatcaccggcaccctgaacggcgtggagttcgagctggtgggcggcggagagggcacccccgagcagggccgcatgaccaacaagatgaagagcaccaaaggcgccctgaccttcagcccctacctgctgagccacgtgatgggctacggcttctaccacttcggcacctaccccagcggctacgagaaccccttcctgcacgccatcaacaacggcggctacaccaacacccgcatcgagaagtacgaggacggcggcgtgctgcacgtgagcttcagctaccgctacgaggccggccgcgtgatcggcgacttcaaggtgatgggcaccggcttccccgaggacagcgtgatcttcaccgacaagatcatccgcagcaacgccaccgtggagcacctgcaccccatgggcgataacgatctggatggcagcttcacccgcaccttcagcctgcgcgacggcggctactacagctccgtggtggacagccacatgcacttcaagagcgccatccaccccagcatcctgcagaacgggggccccatgttcgccttccgccgcgtggaggaggatcacagcaacaccgagctgggcatcgtggagtaccagcacgccttcaagaccccggatgcagatgccggtgaagaaagagtt

SEQ ID NO: 248 - DNA, 1519 bp, Artificial Sequence
  Description of Artificial Sequence: Synthetic polynucleotide
aagcttgggagaagctagacttaaaatcttccattgcagctgtaaacacatctggacaatagtctgttttctgcatttgtgaatcccacacccatggaactatgaatcgtgcatcagagttatttaaaaccaccgtgcatggagtgaaccaataccgaggtgtttgcttatcattttcctttgagcacacagcacagccttgaactcagtgacactcctaagagggctctagggtcaggccaacttagatgagatgctagtctttagctaaagatgcccttccacccccgttgcacgaccttgcttctcagtctttgttgagtcttctgggggagaatccccctagaggactcagtttacaaaaccctaagtgagaccactgccaagaagtgcttgctcacccctcctgccgcggcagggaatccccctttccttgtacaggcaaaacacaaaaaaggactcataagtgaagcctgatccttctcaccaaacactgcccacacctcctagtaattgaacttgaaaaaaaaaactggtttgaaaaattaccgcaaaccatattgtcataaaaaaaaaaaaaaacacttcctatatgagatcacagaacagagtaggcacaagttcctgctgagcagatcagcctaatgcttaaatagaacaactcctggctgtcattgacattgtctaaaagccaagatgacagactgagaggcctgagcccttgttctggcattctcccaggaagatgcagtaaaggggttgacccaatatacaagcttaactagttagcggaccgacgcgtacgcggccgctcgagatggagagcgacgagagcggcctgcccgccatggagatcgagtgccgcatcaccggcaccctgaacggcgtggagttcgagctggtgggcggcggagagggcacccccgagcagggccgcatgaccaacaagatgaagagcaccaaaggcgccctgaccttcagcccctacctgctgagccacgtgatgggctacggcttctaccacttcggcacctaccccagcggctacgagaaccccttcctgcacgccatcaacaacggcggctacaccaacacccgcatcgagaagtacgaggacggcggcgtgctgcacgtgagcttcagctaccgctacgaggccggccgcgtgatcggcgacttcaaggtgatgggcaccggcttccccgaggacagcgtgatcttcaccgacaagatcatccgcagcaacgccaccgtggagcacctgcaccccatgggcgataacgatctggatggcagcttcacccgcaccttcagcctgcgcgacggcggctactacagctccgtggtggacagccacatgcacttcaagagcgccatccaccccagcatcctgcagaacgggggccccatgttcgccttccgccgcgtggaggaggatcacagcaacaccgagctgggcatcgtggagtaccagcacgccttcaagaccccggatgcagatgccggtgaagaaagagtt

SEQ ID NO: 249 - DNA, 1115 bp, Artificial Sequence
  Description of Artificial Sequence: Synthetic polynucleotide
aagcttgatatcgaattaggaggaaaactgtttcatacagaaggcgtcaattaggaggaaaaactgtttcatacagaaggcgtcaattaggaggaaaaactgtttcatacagaaggcgtcaattggtcccatcgaattaggaggaaaaactgtttcatacagaaggcgtcaattaggaggaaaaactgtttcatacagaaggcgtcaattaggaggaaaaactgtttcatacagaaggcgtcaattggtcccgggacattttgacacccccataatatttttccagaattaacagtataaattgcatctcttgttcaagagttccctatcactctctttaatcactactcacagtaacctcaactcctgaagcttaactagttagcggaccgacgcgtacgcggccgctcgagatggagagcgacgagagcggcctgcccgccatggagatcgagtgccgcatcaccggcaccctgaacggcgtggagttcgagctggtgggcggcggagagggcacccccgagcagggccgcatgaccaacaagatgaagagcaccaaaggcgccctgaccttcagcccctacctgctgagccacgtgatgggctacggcttctaccacttcggcacctaccccagcggctacgagaaccccttcctgcacgccatcaacaacggcggctacaccaacacccgcatcgagaagtacgaggacggcggcgtgctgcacgtgagcttcagctaccgctacgaggccggccgcgtgatcggcgacttcaaggtgatgggcaccggcttccccgaggacagcgtgatcttcaccgacaagatcatccgcagcaacgccaccgtggagcacctgcaccccatgggcgataacgatctggatggcagcttcacccgcaccttcagcctgcgcgacggcggctactacagctccgtggtggacagccacatgcacttcaagagcgccatccaccccagcatcctgcagaacgggggccccatgttcgccttccgccgcgtggaggaggatcacagcaacaccgagctgggcatcgtggagtaccagcacgccttcaagaccccggatgcagatgccggtgaagaaagagtt

SEQ ID NO: 250 - DNA, 2265 bp, Artificial Sequence
  Description of Artificial Sequence: Synthetic polynucleotide
atgccacctcctcgcctcctcttcttcctcctcttcctcacccccatggaagtcaggcccgaggaacctctagtggtgaaggtggaagagggagataacgctgtgctgcagtgcctcaaggggacctcagatggccccactcagcagctgacctggtctcgggagtccccgcttaaacccttcttaaaactcagcctggggctgccaggcctgggaatccacatgaggcccctggccatctggcttttcatcttcaacgtctctcaacagatggggggcttctacctgtgccagccggggcccccctctgagaaggcctggcagcctggctggacagtcaatgtggagggcagcggggagctgttccggtggaatgtttcggacctaggtggcctgggctgtggcctgaagaacaggtcctcagagggccccagctccccttccgggaagctcatgagccccaagctgtatgtgtgggccaaagaccgccctgagatctgggagggagagcctccgtgtctcccaccgagggacagcctgaaccagagcctcagccaggacctcaccatggcccctggctccacactctggctgtcctgtggggtaccccctgactctgtgtccaggggccccctctcctggacccatgtgcaccccaaggggcctaagtcattgctgagcctagagctgaaggacgatcgcccggccagagatatgtgggtaatggagacgggtctgttgttgccccgggccacagctcaagacgctggaaagtattattgtcaccgtggcaacctgaccatgtcattccacctggagatcactgctcggccagtactatggcactggctgctgaggactggtggctggaagggaggaggtgggtctggaggtggaggatctggtggaggtgggtctggaggaggtgggtctcaggtgcagctgcaggagtcgggcccaggactggtgaagccttcggagaccctgtccctcacctgcactgtctctggtggctccgtcagcagtggtgattactactggacctggatccggcagtccccagggaagggactggagtggattggacacatctattacagtgggaacaccaattataacccctccctcaagagtcgactcaccatatcaattgacacgtccaagactcagttctccctgaagctgagttctgtgaccgctgcggacacggccatttattactgtgtgcgagatcgagtgactggtgcttttgatatctggggccaagggacaatggtcaccgtctcttcagcctccaccaagggcccatcggtcttccccctggcgccctgctccaggagcacctccgagagcacagcggccctgggctgcctggtcaaggactacttccctgaaccggtgacggtgtcgtggaactcaggcgctctgaccagcggcgtgcacaccttcccggctgtcctacagtcctcaggactctactccctcagcagcgtggtgaccgtgccctccagcaacttcggcacccagacctacacctgcaacgtagatcacaagcccagcaataccaaggtggacaagacagttgagcgcaaatgttgtgtcgagtgcccaccgtgcccagcaccacctgtggcaggaccgtcagtcttcctcttccccccaaaacccaaggacaccctcatgatctcccggacccctgaggtcacgtgcgtggtggtggacgtgagccacgaagaccccgaggtccagttcaactggtacgtggacggcgtggaggtgcataatgccaagacaaagccacgggaggagcagttccaaagcacgttccgtgtggtcagcgtcctcaccgtcgtgcaccaggactggctgaacggcaaggagtacaagtgcaaggtctccaacaaaggcctcccagcccccatcgagaaaaccatctccaaaaccaaagggcagccccgagaaccacaggtgtacaccctgcccccatcccgggaggagatgaccaagaaccaggtcagcctgacctgcctggtcaaaggcttctaccccagcgacatcgccgtggagtgggagagcaatgggcagccggagaacaactacaagaccacgcctcccatgctggactccgacggctccttcttcctctacagcaagctcaccgtggacaagagcaggtggcagcaggggaacgtcttctcatgctccgtgatgcatgaggctctgcacaaccactacacgcagaagagcctctccctgtctccgggt

SEQ ID NO: 251 - DNA, 2253 bp, Artificial Sequence
  Description of Artificial Sequence: Synthetic polynucleotide
atgccacctcctcgcctcctcttcttcctcctcttcctcacccccatggaagtcaggcccgaggaacctctagtggtgaaggtggaagagggagataacgctgtgctgcagtgcctcaaggggacctcagatggccccactcagcagctgacctggtctcgggagtccccgcttaaacccttcttaaaactcagcctggggctgccaggcctgggaatccacatgaggcccctggccatctggcttttcatcttcaacgtctctcaacagatggggggcttctacctgtgccagccggggcccccctctgagaaggcctggcagcctggctggacagtcaatgtggagggcagcggggagctgttccggtggaatgtttcggacctaggtggcctgggctgtggcctgaagaacaggtcctcagagggccccagctccccttccgggaagctcatgagccccaagctgtatgtgtgggccaaagaccgccctgagatctgggagggagagcctccgtgtctcccaccgagggacagcctgaaccagagcctcagccaggacctcaccatggcccctggctccacactctggctgtcctgtggggtaccccctgactctgtgtccaggggccccctctcctggacccatgtgcaccccaaggggcctaagtcattgctgagcctagagctgaaggacgatcgcccggccagagatatgtgggtaatggagacgggtctgttgttgccccgggccacagctcaagacgctggaaagtattattgtcaccgtggcaacctgaccatgtcattccacctggagatcactgctcggccagtactatggcactggctgctgaggactggtggctggaagggaggaggtgggtctggaggaggtgggtctggaggtggaggatctggtggaggtgggtctcaggttcagctggtgcagtctggtgctgaggtgaagaagcctggtgcctcagtgaaggtctcctgcaaggcttctggttacacattcactgactactacatgcactgggtgcgtcaggcccctggtcaaggtcttgagtggatgggtcgtgttaatcctaaccggaggggtactacctacaaccagaaattcgagggccgtgtcaccatgaccacagacacatccacgagcacagcctacatggagctgcgtagcctgcgttctgacgacacggccgtgtattactgtgcgcgtgcgaactggcttgactactggggccagggcaccaccgtcaccgtctcctccgcctccaccaagggcccatcggtcttcccgctagcgccctgctccaggagcacctccgagagcacagccgccctgggctgcctggtcaaggactacttccccgaaccggtgacggtgtcgtggaactcaggcgccctgaccagcggcgtgcacaccttcccggctgtcctacagtcctcaggactctactccctcagcagcgtggtgaccgtgccctccagcagcttgggcacgaagacctacacctgcaacgtagatcacaagcccagcaacaccaaggtggacaagagagttgagtccaaatatggtcccccatgcccaccctgcccagcacctgaggccgccgggggaccatcagtcttcctgttccccccaaaacccaaggacactctcatgatctcccggacccctgaggtcacgtgcgtggtggtggacgtgagccaggaagaccccgaggtccagttcaactggtacgtggatggcgtggaggtgcataatgccaagacaaagccgcgggaggagcagttcaacagcacgtaccgtgtggtcagcgtcctcaccgtcctgcaccaggactggctgaacggcaaggagtacaagtgcaaggtctccaacaaaggcctcccgtcctccatcgagaaaaccatctccaaagccaaagggcagccccgagagccacaggtgtacaccctgcccccatcccaggaggagatgaccaagaaccaggtcagcctgacctgcctggtcaaaggcttctaccccagcgacatcgccgtggagtgggaaagcaatgggcagccggagaacaactacaagaccacgcctcccgtgctggactccgacggctccttcttcctctacagcaggctaaccgtggacaagagcaggtggcaggaggggaatgtcttctcatgctccgtgatgcatgaggctctgcacaaccactacacacagaagagcctctccctgtctctg

SEQ ID NO: 252 - DNA, 1710 bp, Artificial Sequence
  Description of Artificial Sequence: Synthetic polynucleotide
atgccacctcctcgcctcctcttcttcctcctcttcctcacccccatggaagtcaggcccgaggaacctctagtggtgaaggtggaagagggagataacgctgtgctgcagtgcctcaaggggacctcagatggccccactcagcagctgacctggtctcgggagtccccgcttaaacccttcttaaaactcagcctggggctgccaggcctgggaatccacatgaggcccctggccatctggcttttcatcttcaacgtctctcaacagatggggggcttctacctgtgccagccggggcccccctctgagaaggcctggcagcctggctggacagtcaatgtggagggcagcggggagctgttccggtggaatgtttcggacctaggtggcctgggctgtggcctgaagaacaggtcctcagagggccccagctccccttccgggaagctcatgagccccaagctgtatgtgtgggccaaagaccgccctgagatctgggagggagagcctccgtgtctcccaccgagggacagcctgaaccagagcctcagccaggacctcaccatggcccctggctccacactctggctgtcctgtggggtaccccctgactctgtgtccaggggccccctctcctggacccatgtgcaccccaaggggcctaagtcattgctgagcctagagctgaaggacgatcgcccggccagagatatgtgggtaatggagacgggtctgttgttgccccgggccacagctcaagacgctggaaagtattattgtcaccgtggcaacctgaccatgtcattccacctggagatcactgctcggccagtactatggcactggctgctgaggactggtggctggaagggaggaggtgggtctggaggtggaggatctggtggaggtgggtctggaggaggtgggtctcaggtgcagctggtgcagagcggcgccgaggacaagaagcccggcgagagcgtgaagatcagctgcaaggccagcggctacaccttcaccaactacggcatgaactgggtgaggcaggcccccggccagggcctgaagtggatgggctggatcaacacctacaccggcgagagcacctacgccgacgacttcaagggcaggttcgccttcagcctggacaccagcgccagcaccgcctacctgcagctgagcagcctgaggggcgaggacaccgccgtgtacttctgcgccaggttcgccatcaagggcgactactggggccagggcaccaccgtgaccgtgagcagcgccagcaccggcggcggcggcagcggcggcggcggcagcggcggcggcggcagcggcggcggcggcagcgacatcgtgatgacccagagccccctgagcctggaggtgagccccggcgagcccgccagcatcagctgcaggagcaccaagagcctgctgcacagcgacggcatcacctacctgtactggtacctgcagaagcccggccagagcccccagctgctgatctaccagctgagcaacctggccagcggcgtgcccgacaggttcagcagcagcggcagcggcaccgacttcaccctgaagatcagcagggtggaggccgaggacgagggcacctactactgcgcccagaacctggagatccccaggaccttcggccagggcaccaagctggagatcaagaggacccatcatcaccatcaccat

SEQ ID NO: 253 - DNA, 1695 bp, Artificial Sequence
  Description of Artificial Sequence: Synthetic polynucleotide
atgccacctcctcgcctcctcttcttcctcctcttcctcacccccatggaagtcaggcccgaggaacctctagtggtgaaggtggaagagggagataacgctgtgctgcagtgcctcaaggggacctcagatggccccactcagcagctgacctggtctcgggagtccccgcttaaacccttcttaaaactcagcctggggctgccaggcctgggaatccacatgaggcccctggccatctggcttttcatcttcaacgtctctcaacagatggggggcttctacctgtgccagccggggcccccctctgagaaggcctggcagcctggctggacagtcaatgtggagggcagcggggagctgttccggtggaatgtttcggacctaggtggcctgggctgtggcctgaagaacaggtcctcagagggccccagctccccttccgggaagctcatgagccccaagctgtatgtgtgggccaaagaccgccctgagatctgggagggagagcctccgtgtctcccaccgagggacagcctgaaccagagcctcagccaggacctcaccatggcccctggctccacactctggctgtcctgtggggtaccccctgactctgtgtccaggggccccctctcctggacccatgtgcaccccaaggggcctaagtcattgctgagcctagagctgaaggacgatcgcccggccagagatatgtgggtaatggagacgggtctgttgttgccccgggccacagctcaagacgctggaaagtattattgtcaccgtggcaacctgaccatgtcattccacctggagatcactgctcggccagtactatggcactggctgctgaggactggtggctggaagggaggaggtgggtctggaggtggaggatctggtggaggtgggtctggaggaggtgggtctcaggttcagctggtgcagtctggtgctgaggatgtgaagcctgatgcctcagtgaagctctcctgcaaggcttctggttacacattcactgactactacatgcactgggtgcgtcaggcccctggtcaaggtcttgagtggatgggtcgtgttaatcctaaccggaggggtactacctacaaccagaaattcgagggccgtgtcaccatgaccacagacacatccacgagcacagcctacatgcagctgagtagcctgcgtggtgaagacacggccgtgtattactgtgcgcgtgcgaactggcttgactactggggccagggcaccaccgtcaccgtctcctccgcctccaccgggggaggtgggtctggaggtggaggatctggtggaggtgggtctggtggaggtgggtctgacatccagatgacccagtctccatcctccctggaggcatctgtaggagacagagtcaccatcacttgcagtgtcagctcaagtgtatcctccatttacttgcactggtatcagcagaaaccagggaaaagccctaagctcctgatctatagcacatccaacttggcttctggagtcccagataggttcagtggcagtggatctgggacagatttcactctcaccatcagcagtctgcaagccgaagatgagggcacttactactgtcaagtctacagtggttacccgctcacgttcggcggagggaccaagctggagatcaaacgaactcatcatcaccatcaccat

SEQ ID NO: 254 - DNA, 1704 bp, Artificial Sequence
  Description of Artificial Sequence: Synthetic polynucleotide
atgccacctcctcgcctcctcttcttcctcctcttcctcacccccatggaagtcaggcccgaggaacctctagtggtgaaggtggaagagggagataacgctgtgctgcagtgcctcaaggggacctcagatggccccactcagcagctgacctggtctcgggagtccccgcttaaacccttcttaaaactcagcctggggctgccaggcctgggaatccacatgaggcccctggccatctggcttttcatcttcaacgtctctcaacagatggggggcttctacctgtgccagccggggcccccctctgagaaggcctggcagcctggctggacagtcaatgtggagggcagcggggagctgttccggtggaatgtttcggacctaggtggcctgggctgtggcctgaagaacaggtcctcagagggccccagctccccttccgggaagctcatgagccccaagctgtatgtgtgggccaaagaccgccctgagatctgggagggagagcctccgtgtctcccaccgagggacagcctgaaccagagcctcagccaggacctcaccatggcccctggctccacactctggctgtcctgtggggtaccccctgactctgtgtccaggggccccctctcctggacccatgtgcaccccaaggggcctaagtcattgctgagcctagagctgaaggacgatcgcccggccagagatatgtgggtaatggagacgggtctgttgttgccccgggccacagctcaagacgctggaaagtattattgtcaccgtggcaacctgaccatgtcattccacctggagatcactgctcggccagtactatggcactggctgctgaggactggtggctggaagggaggaggtgggtctggaggtggaggatctggtggaggtgggtctggaggaggtgggtctcaggtgcagctgcaggagagcggccccggcgacgtgaagcccagcgagaccctgagcctgacctgcaccgtgagcggcggcagcgtgagcagcggcgactactactggacctggatcaggcagagccccggcaagggcctggagtggatcggccacatctactacagcggcaacaccaactacaaccccagcctgaagagcaggctgaccatcagcatcgacaccagcaagaccaccttcagcctgcagctgagcagcgtgaccggcgaggacaccgccatctactactgcgtgagggacagggtgaccggcgccttcgacatctggggccagggcaccaccgtgaccgtgagcagcgccagcaccggcggcggcggcagcggcggcggcggcagcggcggcggcggcagcggcggcggcggcagcgacatccagatgacccagagccccagcagcctggaggccagcgtgggcgacagggtgaccatcacctgccaggccagccaggacatcagcaactacctgaactggtaccagcagaagcccggcaagagccccaagctgctgatctacgacgccagcaacctggagaccggcgtgcccgacaggttcagcggcagcggcagcggcaccgacttcaccttcaccatcagcagcctgcaggccgaggacgagggcacctacttctgccagcacttcgaccacctgcccctggccttcggcggcggcaccaagctggagatcaagaggacccatcatcaccatcaccat

SEQ ID NO: 255 - DNA, 1692 bp, Artificial Sequence
  Description of Artificial Sequence: Synthetic polynucleotide
atgccacctcctcgcctcctcttcttcctcctcttcctcacccccatggaagtcaggcccgaggaacctctagtggtgaaggtggaagagggagataacgctgtgctgcagtgcctcaaggggacctcagatggccccactcagcagctgacctggtctcgggagtccccgcttaaacccttcttaaaactcagcctggggctgccaggcctgggaatccacatgaggcccctggccatctggcttttcatcttcaacgtctctcaacagatggggggcttctacctgtgccagccggggcccccctctgagaaggcctggcagcctggctggacagtcaatgtggagggcagcggggagctgttccggtggaatgtttcggacctaggtggcctgggctgtggcctgaagaacaggtcctcagagggccccagctccccttccgggaagctcatgagccccaagctgtatgtgtgggccaaagaccgccctgagatctgggagggagagcctccgtgtctcccaccgagggacagcctgaaccagagcctcagccaggacctcaccatggcccctggctccacactctggctgtcctgtggggtaccccctgactctgtgtccaggggccccctctcctggacccatgtgcaccccaaggggcctaagtcattgctgagcctagagctgaaggacgatcgcccggccagagatatgtgggtaatggagacgggtctgttgttgccccgggccacagctcaagacgctggaaagtattattgtcaccgtggcaacctgaccatgtcattccacctggagatcactgctcggccagtactatggcactggctgctgaggactggtggctggaaggggggaggtgggtctggaggtggaggatctggtggaggtgggtctggtggaggtgggtctgaggtgcagctggtggagtctggtggtggtcttgttcaacctggtggttctcttcgtctttcttgtgctgcttctggttttaatattaaagatacttatattcattgggttcgtcaagctcctggtaaaggtcttgaatgggttgctcgtatttatcctactaatggttatactcgttatgctgattctgttaaaggtcgttttactatttctgctgatacttctaaaaatactgcttatcttcaaatgaactctcttcgtgctgaagatactgctgtttattattgttctcgttggggtggtgatggtttttatgctatggattattggggtcaaggtactcttgtcaccgtctcctcagctagcaccgggggaggtgggtctggaggtggaggatctggtggaggtgggtctgacatccagatgacccagtctccttcttctctttctgcttctgttggtgatcgtgttactattacttgtcgtgcttctcaagatgttaatactgctgttgcttggtatcaacaaaaacctggtaaagctcctaaacttcttatttattctgcttcttttctttattctggtgttccttctcgtttttctggttctcgttctggtactgattttactcttactatttcttctcttcaacctgaagattttgctacttattattgtcaacaacattatactactcctcctacttttggtcaaggtaccaaggtggagatcaaacgtacgcatcatcaccatcaccat

SEQ ID NO: 256 - DNA, 2352 bp, Artificial Sequence
  Description of Artificial Sequence: Synthetic polynucleotide
atgccacctcctcgcctcctcttcttcctcctcttcctcacccccatggaagtcaggcccgaggaacctctagtggtgaaggtggaagagggagataacgctgtgctgcagtgcctcaaggggacctcagatggccccactcagcagctgacctggtctcgggagtccccgcttaaacccttcttaaaactcagcctggggctgccaggcctgggaatccacatgaggcccctggccatctggcttttcatcttcaacgtctctcaacagatggggggcttctacctgtgccagccggggcccccctctgagaaggcctggcagcctggctggacagtcaatgtggagggcagcggggagctgttccggtggaatgtttcggacctaggtggcctgggctgtggcctgaagaacaggtcctcagagggccccagctccccttccgggaagctcatgagccccaagctgtatgtgtgggccaaagaccgccctgagatctgggagggagagcctccgtgtctcccaccgagggacagcctgaaccagagcctcagccaggacctcaccatggcccctggctccacactctggctgtcctgtggggtaccccctgactctgtgtccaggggccccctctcctggacccatgtgcaccccaaggggcctaagtcattgctgagcctagagctgaaggacgatcgcccggccagagatatgtgggtaatggagacgggtctgttgttgccccgggccacagctcaagacgctggaaagtattattgtcaccgtggcaacctgaccatgtcattccacctggagatcactgctcggccagtactatggcactggctgctgaggactggtggctggaaggacaaaactcacacatgcccaccgtgcccagcacctgaactcctggggggaccgtcagtcttcctcttccccccaaaacccaaggacaccctcatgatctcccggacccctgaggtcacatgcgtggtggtggacgtgagccacgaagaccctgaggtcaagttcaactggtacgtggacggcgtggaggtgcataatgccaagacaaagccgcgggaggagcagtacaacagcacgtaccgtgtggtcagcgtcctcaccgtcctgcaccaggactggctgaatggcaaggagtacaagtgcaaggtctccaacaaagccctcccagcccccatcgagaaaaccatctccaaagccaaagggcagccccgagaaccacaggtgtacaccctgcccccatcccgggaggagatgaccaagaaccaggtcagcctgacctgcctggtcaaaggcttctatcccagcgacatcgccgtggagtgggagagcaatgggcagccggagaacaactacaagaccacgcctcccgtgctggactccgacggctccttcttcctctacagcaagctcaccgtggacaagagcaggtggcagcaggggaacgtcttctcatgctccgtgatgcacgaggctctgcacaaccactacacgcagaagagcctctccctgtctccgggtggaggaggtgggtctggaggtggaggatctggtggaggtgggtctggaggaggtgggtctgaggtgcagctggtggagtctggtggtggtcttgttcaacctggtggttctcttcgtctttcttgtgctgcttctggttttaatattaaagatacttatattcattgggttcgtcaagctcctggtaaaggtcttgaatgggttgctcgtatttatcctactaatggttatactcgttatgctgattctgttaaaggtcgttttactatttctgctgatacttctaaaaatactgcttatcttcaaatgaactctcttcgtgctgaagatactgctgtttattattgttctcgttggggtggtgatggtttttatgctatggattattggggtcaaggtactcttgtcaccgtctcctcagctagcaccgggggaggtgggtctggaggtggaggatctggtggaggtgggtctgacatccagatgacccagtctccttcttctctttctgcttctgttggtgatcgtgttactattacttgtcgtgcttctcaagatgttaatactgctgttgcttggtatcaacaaaaacctggtaaagctcctaaacttcttatttattctgcttcttttctttattctggtgttccttctcgtttttctggttctcgttctggtactgattttactcttactatttcttctcttcaacctgaagattttgctacttattattgtcaacaacattatactactcctcctacttttggtcaaggtaccaaggtggagatcaaacgtacg

SEQ ID NO: 257 - DNA, 2787 bp, Artificial Sequence
  Description of Artificial Sequence: Synthetic polynucleotide
atggagctggcggccttgtgccgctgggggctcctcctcgccctcttgccccccggagccgcgagcacccaagtgtgcaccggcacagacatgaagctgcggctccctgccagtcccgagacccacctggacatgctccgccacctctaccagggctgccaggtggtgcagggaaacctggaactcacctacctgcccaccaatgccagcctgtccttcctgcaggatatccaggaggtgcagggctacgtgctcatcgctcacaaccaagtgaggcaggtcccactgcagaggctgcggattgtgcgaggcacccagctctttgaggacaactatgccctggccgtgctagacaatggagacccgctgaacaataccacccctgtcacaggggcctccccaggaggcctgcgggagctgcagcttcgaagcctcacagagatcttgaaaggaggggtcttgatccagcggaacccccagctctgctaccaggacacgattttgtggaaggacatcttccacaagaacaaccagctggctctcacactgatagacaccaaccgctctcgggcctgccacccctgttctccgatgtgtaagggctcccgctgctggggagagagttctgaggattgtcagagcctgacgcgcactgtctgtgccggtggctgtgcccgctgcaaggggccactgcccactgactgctgccatgagcagtgtgctgccggctgcacgggccccaagcactctgactgcctggcctgcctccacttcaaccacagtggcatctgtgagctgcactgcccagccctggtcacctacaacacagacacgtttgagtccatgcccaatcccgagggccggtatacattcggcgccagctgtgtgactgcctgtccctacaactacctttctacggacgtgggatcctgcaccctcgtctgccccctgcacaaccaagaggtgacagcagaggatggaacacagcggtgtgagaagtgcagcaagccctgtgcccgagtgtgctatggtctgggcatggagcacttgcgagaggtgagggcagttaccagtgccaatatccaggagtttgctggctgcaagaagatctttgggagcctggcatttctgccggagagctttgatggggacccagcctccaacactgccccgctccagccagagcagctccaagtgtttgagactctggaagagatcacaggttacctatacatctcagcatggccggacagcctgcctgacctcagcgtcttccagaacctgcaagtaatccggggacgaattctgcacaatggcgcctactcgctgaccctgcaagggctgggcatcagctggctggggctgcgctcactgagggaactgggcagtggactggccctcatccaccataacacccacctctgcttcgtgcacacggtgccctgggaccagctctttcggaacccgcaccaagctctgctccacactgccaaccggccagaggacgagtgtgtgggcgagggcctggcctgccaccagctgtgcgcccgagggcactgctggggtccagggcccacccagtgtgtcaactgcagccagttccttcggggccaggagtgcgtggaggaatgccgagtactgcaggggctccccagggagtatgtgaatgccaggcactgtttgccgtgccaccctgagtgtcagccccagaatggctcagtgacctgttttggaccggaggctgaccagtgtgtggcctgtgcccactataaggaccctcccttctgcgtggcccgctgccccagcggtgtgaaacctgacctctcctacatgcccatctggaagtttccagatgaggagggcgcatgccagccttgccccatcaactgcacccactcctgtgtggacctggatgacaagggctgccccgccgagcagagagccagccctctgacgggaggaggtgggtctggaggtggaggatctggtggaggtgggtctggaggaggtgggtctcaggtgcagctgcaggagagcggccccggcgacgtgaagcccagcgagaccctgagcctgacctgcaccgtgagcggcggcagcgtgagcagcggcgactactactggacctggatcaggcagagccccggcaagggcctggagtggatcggccacatctactacagcggcaacaccaactacaaccccagcctgaagagcaggctgaccatcagcatcgacaccagcaagaccaccttcagcctgcagctgagcagcgtgaccggcgaggacaccgccatctactactgcgtgagggacagggtgaccggcgccttcgacatctggggccagggcaccaccgtgaccgtgagcagcgccagcaccggcggcggcggcagcggcggcggcggcagcggcggcggcggcagcggcggcggcggcagcgacatccagatgacccagagccccagcagcctggaggccagcgtgggcgacagggtgaccatcacctgccaggccagccaggacatcagcaactacctgaactggtaccagcagaagcccggcaagagccccaagctgctgatctacgacgccagcaacctggagaccggcgtgcccgacaggttcagcggcagcggcagcggcaccgacttcaccttcaccatcagcagcctgcaggccgaggacgagggcacctacttctgccagcacttcgaccacctgcccctggccttcggcggcggcaccaagctggagatcaagaggacccatcatcaccatcaccat

SEQ ID NO: 258 - DNA, 1362 bp, Artificial Sequence
  Description of Artificial Sequence: Synthetic polynucleotide
atggagctggcggccttgtgccgctgggggctcctcctcgccctcttgccccccggagccgcgagcaaccggccagaggacgagtgtgtgggcgagggcctggcctgccaccagctgtgcgcccgagggcactgctggggtccagggcccacccagtgtgtcaactgcagccagttccttcggggccaggagtgcgtggaggaatgccgagtactgcaggggctccccagggagtatgtgaatgccaggcactgtttgccgtgccaccctgagtgtcagccccagaatggctcagtgacctgttttggaccggaggctgaccagtgtgtggcctgtgcccactataaggaccctcccttctgcgtggcccgctgccccagcggtgtgaaacctgacctctcctacatgcccatctggaagtttccagatgaggagggcgcatgccagccttgccccatcaactgcacccactcctgtgtggacctggatgacaagggctgccccgccgagcagagagccagccctctgacgggaggaggtgggtctggaggtggaggatctggtggaggtgggtctggaggaggtgggtctcaggtgcagctgcaggagagcggccccggcgacgtgaagcccagcgagaccctgagcctgacctgcaccgtgagcggcggcagcgtgagcagcggcgactactactggacctggatcaggcagagccccggcaagggcctggagtggatcggccacatctactacagcggcaacaccaactacaaccccagcctgaagagcaggctgaccatcagcatcgacaccagcaagaccaccttcagcctgcagctgagcagcgtgaccggcgaggacaccgccatctactactgcgtgagggacagggtgaccggcgccttcgacatctggggccagggcaccaccgtgaccgtgagcagcgccagcaccggcggcggcggcagcggcggcggcggcagcggcggcggcggcagcggcggcggcggcagcgacatccagatgacccagagccccagcagcctggaggccagcgtgggcgacagggtgaccatcacctgccaggccagccaggacatcagcaactacctgaactggtaccagcagaagcccggcaagagccccaagctgctgatctacgacgccagcaacctggagaccggcgtgcccgacaggttcagcggcagcggcagcggcaccgacttcaccttcaccatcagcagcctgcaggccgaggacgagggcacctacttctgccagcacttcgaccacctgcccctggccttcggcggcggcaccaagctggagatcaagaggacccatcatcaccatcaccat

SEQ ID NO: 259-262 - skipped (4 entries)

SEQ ID NO: 263 - DNA, 1689 bp, Artificial Sequence
  Description of Artificial Sequence: Synthetic polynucleotide
atgccacctcctcgcctcctcttcttcctcctcttcctcacccccatggaagtcaggcccgaggaacctctagtggtgaaggtggaagagggagataacgctgtgctgcagtgcctcaaggggacctcagatggccccactcagcagctgacctggtctcgggagtccccgcttaaacccttcttaaaactcagcctggggctgccaggcctgggaatccacatgaggcccctggccatctggcttttcatcttcaacgtctctcaacagatggggggcttctacctgtgccagccggggcccccctctgagaaggcctggcagcctggctggacagtcaatgtggagggcagcggggagctgttccggtggaatgtttcggacctaggtggcctgggctgtggcctgaagaacaggtcctcagagggccccagctccccttccgggaagctcatgagccccaagctgtatgtgtgggccaaagaccgccctgagatctgggagggagagcctccgtgtctcccaccgagggacagcctgaaccagagcctcagccaggacctcaccatggcccctggctccacactctggctgtcctgtggggtaccccctgactctgtgtccaggggccccctctcctggacccatgtgcaccccaaggggcctaagtcattgctgagcctagagctgaaggacgatcgcccggccagagatatgtgggtaatggagacgggtctgttgttgccccgggccacagctcaagacgctggaaagtattattgtcaccgtggcaacctgaccatgtcattccacctggagatcactgctcggccagtactatggcactggctgctgaggactggtggctggaagggaggaggtgggtctggaggtggaggatctggtggaggtgggtctggaggaggtgggtctgaggtgcagctgcagcagtctggggctgagctggtgaagcctggggcctcagtgaagatgtcctgcaaggcttctggctacacatttaccagttacaatatgcactgggtaaagcagacacctggacagggcctggaatggattggagctatttatccaggaaatggtgatacttcctacaatcagaagttcaaaggcaaggccacattgactgcagacaaatcctccagcacagcctacatgcagctcagcagcctgacatctgaggactctgcggactattactgtgcaagatctaattattacggtagtagctactggttcttcgatgtctggggcgcagggaccacggtcaccgtctcctcaggcagtactagcggtggtggctccgggggcggttccggtgggggcggcagcagcgacattgtgctgacccaatctccagctatcctgtctgcatctccaggggagaaggtcacaatgacttgcagggccagctcaagtgtaaattacatggactggtaccagaagaagccaggatcctcccccaaaccctggatttatgccacatccaacctggcttctggagtccctgctcgcttcagtggcagtgggtctgggacctcttactctctcacaatcagcagagtggaggctgaagatgctgccacttattactgccagcagtggagttttaatccacccacgttcggaggggggaccaagctggaaataaaacatcatcaccatcaccat

SEQ ID NO: 264 - DNA, 1815 bp, Artificial Sequence
  Description of Artificial Sequence: Synthetic polynucleotide
atgcatctcctcggcccctggctcctgctcctggttctagaatacttggctttctctgactcaagtaaatgggtttttgagcaccctgaaaccctctacgcctgggagggggcctgcgtctggatcccctgcacctacagagccctagatggtgacctggaaagcttcatcctgttccacaatcctgagtataacaagaacacctcgaagtttgatgggacaagactctatgaaagcacaaaggatgggaaggttccttctgagcagaaaagggtgcaattcctgggagacaagaataaggcctgcacactgagtatccacccggtgcacctcaatgacagtggtcagctggggctgaggatggagtccaagactgagaaatggatggaacgaatacacctcaatgtctctgaaaggccttttccacctcatatccagctccctccagaaattcaagagtcccaggaagtcactctgacctgcttgctgaatttctcctgctatgggtatccgatccaattgcagtggctcctagagggggttccaatgaggcaggctgctgtcacctcgacctccttgaccatcaagtctgtcttcacccggagcgagctcaagttctccccacagtggagtcaccatgggaagattgtgacctgccagcttcaggatgcagatgggaagttcctctccaatgacacggtgcagctgaacgtgaagcacaccccgaagttggagatcaaggtcactcccagtgatgccatagtgagggagggggactctgtgaccatgacctgcgaggtcagcagcagcaacccggagtacacgacggtatcctggctcaaggatgggacctcgctgaagaagcagaatacattcacgctaaacctgcgcgaagtgaccaaggaccagagtgggaagtactgctgtcaggtctccaatgacgtgggcccgggaaggtcggaagaagtgttcctgcaagtgcagtatgccccggaaggaggaggtgggtctggaggtggaggatctggtggaggtgggtctggaggaggtgggtctgacatccagatgacacagactacatcctccctgtctgcctctctgggagacagagtcaccatcagttgcagggcaagtcaggacattagtaaatatttaaattggtatcagcagaaaccagatggaactgttaaactcctgatctaccatacatcaagattacactcaggagtcccatcaaggttcagtggcagtgggtctggaacagattattctctcaccattagcaacctggagcaagaagatattgccacttacttttgccaacagggtaatacgcttccgtacacgttcggaggggggactaagttggaaataacaggaggaggtgggtctggaggtggaggatctggtggaggtgggtctggaggaggtgggtctgaggtgaaactgcaggagtcaggacctggcctggtggcgccctcacagagcctgtccgtcacatgcactgtctcaggggtctcattacccgactatggtgtaagctggattcgccagcctccacgaaagggtctggagtggctgggagtaatatggggtagtgaaaccacatactataattcagctctcaaatccagactgaccatcatcaaggacaactccaagagccaagttttcttaaaaatgaacagtctgcaaactgatgacacagccatttactactgtgccaaacattattactacggtggtagctatgctatggactactggggtcaaggaacctcagtcaccgtctcctcacatcatcaccatcaccat

SEQ ID NO: 265 - DNA, 1812 bp, Artificial Sequence
  Description of Artificial Sequence: Synthetic polynucleotide
atgcatctcctcggcccctggctcctgctcctggttctagaatacttggctttctctgactcaagtaaatgggtttttgagcaccctgaaaccctctacgcctgggagggggcctgcgtctggatcccctgcacctacagagccctagatggtgacctggaaagcttcatcctgttccacaatcctgagtataacaagaacacctcgaagtttgatgggacaagactctatgaaagcacaaaggatgggaaggttccttctgagcagaaaagggtgcaattcctgggagacaagaataaggcctgcacactgagtatccacccggtgcacctcaatgacagtggtcagctggggctgaggatggagtccaagactgagaaatggatggaacgaatacacctcaatgtctctgaaaggccttttccacctcatatccagctccctccagaaattcaagagtcccaggaagtcactctgacctgcttgctgaatttctcctgctatgggtatccgatccaattgcagtggctcctagagggggttccaatgaggcaggctgctgtcacctcgacctccttgaccatcaagtctgtcttcacccggagcgagctcaagttctccccacagtggagtcaccatgggaagattgtgacctgccagcttcaggatgcagatgggaagttcctctccaatgacacggtgcagctgaacgtgaagcacaccccgaagttggagatcaaggtcactcccagtgatgccatagtgagggagggggactctgtgaccatgacctgcgaggtcagcagcagcaacccggagtacacgacggtatcctggctcaaggatgggacctcgctgaagaagcagaatacattcacgctaaacctgcgcgaagtgaccaaggaccagagtgggaagtactgctgtcaggtctccaatgacgtgggcccgggaaggtcggaagaagtgttcctgcaagtgcagtatgccccggaaggaggaggtgggtctggaggtggaggatctggtggaggtgggtctggaggaggtgggtctgaggtgcagctgcagcagtctggggctgagctggtgaagcctggggcctcagtgaagatgtcctgcaaggcttctggctacacatttaccagttacaatatgcactgggtaaagcagacacctggacagggcctggaatggattggagctatttatccaggaaatggtgatacttcctacaatcagaagttcaaaggcaaggccacattgactgcagacaaatcctccagcacagcctacatgcagctcagcagcctgacatctgaggactctgcggactattactgtgcaagatctaattattacggtagtagctactggttcttcgatgtctggggcgcagggaccacggtcaccgtctcctcaggcagtactagcggtggtggctccgggggcggttccggtgggggcggcagcagcgacattgtgctgacccaatctccagctatcctgtctgcatctccaggggagaaggtcacaatgacttgcagggccagctcaagtgtaaattacatggactggtaccagaagaagccaggatcctcccccaaaccctggatttatgccacatccaacctggcttctggagtccctgctcgcttcagtggcagtgggtctgggacctcttactctctcacaatcagcagagtggaggctgaagatgctgccacttattactgccagcagtggagttttaatccacccacgttcggaggggggaccaagctggaaataaaacatcatcaccatcaccat

SEQ ID NO: 266 - DNA, 1340 bp, Artificial Sequence
  Description of Artificial Sequence: Synthetic polynucleotide
aagcttgttgacattgattattgactagttattaatagtaatcaattacggggtcattagttcatagcccatatatggagttccgcgttacataacttacggtaaatggcccgcctggctgaccgcccaacgacccccgcccattgacgtcaataatgacgtatgttcccatagtaacgccaatagggactttccattgacgtcaatgggtggagtatttacggtaaactgcccacttggcagtacatcaagtgtatcatatgccaagtacgccccctattgacgtcaatgacggtaaatggcccgcctggcattatgcccagtacatgaccttatgggactttcctacttggcagtacatctacgtattagtcatcgctattaccatggtgatgcggttttggcagtacatcaatgggcgtggatagcggtttgactcacggggatttccaagtctccaccccattgacgtcaatgggagtttgttttggcaccaaaatcaacgggactttccaaaatgtcgtaacaactccgccccattgacgcaaatgggcggtaggcgtgtacggtgggaggtctatataagcagagctcaagcttaactagttagcggaccgacgcgtacgcggccgctcgagatggagagcgacgagagcggcctgcccgccatggagatcgagtgccgcatcaccggcaccctgaacggcgtggagttcgagctggtgggcggcggagagggcacccccgagcagggccgcatgaccaacaagatgaagagcaccaaaggcgccctgaccttcagcccctacctgctgagccacgtgatgggctacggcttctaccacttcggcacctaccccagcggctacgagaaccccttcctgcacgccatcaacaacggcggctacaccaacacccgcatcgagaagtacgaggacggcggcgtgctgcacgtgagcttcagctaccgctacgaggccggccgcgtgatcggcgacttcaaggtgatgggcaccggcttccccgaggacagcgtgatcttcaccgacaagatcatccgcagcaacgccaccgtggagcacctgcaccccatgggcgataacgatctggatggcagcttcacccgcaccttcagcctgcgcgacggcggctactacagctccgtggtggacagccacatgcacttcaagagcgccatccaccccagcatcctgcagaacgggggccccatgttcgccttccgccgcgtggaggaggatcacagcaacaccgagctgggcatcgtggagtaccagcacgccttcaagaccccggatgcagatgccggtgaagaaagagtt

SEQ ID NO: 267 - DNA, 1737 bp, Artificial Sequence
  Description of Artificial Sequence: Synthetic polynucleotide
atgccacctcctcgcctcctcttcttcctcctcttcctcacccccatggaagtcaggcccgaggaacctctagtggtgaaggtggaagagggagataacgctgtgctgcagtgcctcaaggggacctcagatggccccactcagcagctgacctggtctcgggagtccccgcttaaacccttcttaaaactcagcctggggctgccaggcctgggaatccacatgaggcccctggccatctggcttttcatcttcaacgtctctcaacagatggggggcttctacctgtgccagccggggcccccctctgagaaggcctggcagcctggctggacagtcaatgtggagggcagcggggagctgttccggtggaatgtttcggacctaggtggcctgggctgtggcctgaagaacaggtcctcagagggccccagctccccttccgggaagctcatgagccccaagctgtatgtgtgggccaaagaccgccctgagatctgggagggagagcctccgtgtctcccaccgagggacagcctgaaccagagcctcagccaggacctcaccatggcccctggctccacactctggctgtcctgtggggtaccccctgactctgtgtccaggggccccctctcctggacccatgtgcaccccaaggggcctaagtcattgctgagcctagagctgaaggacgatcgcccggccagagatatgtgggtaatggagacgggtctgttgttgccccgggccacagctcaagacgctggaaagtattattgtcaccgtggcaacctgaccatgtcattccacctggagatcactgctcggccagtactatggcactggctgctgaggactggtggctggaagggaggaggtgggtctggaggtggaggatctggtggaggtgggtctggaggaggtgggtctgacatcctgatgacccaatctccatcctccatgtctgtatctctgggagacacagtcagcatcacttgccattcaagtcaggacattaacagtaatatagggtggttgcagcagagaccagggaaatcatttaagggcctgatctatcatggaaccaacttggacgatgaagttccatcaaggttcagtggcagtggatctggagccgattattctctcaccatcagcagcctggaatctgaagattttgcagactattactgtgtacagtatgctcagtttccgtggacgttcggtggaggcaccaagctcgaaatcaaacgtggaggaggtgggtctggaggtggaggatctggtggaggtgggtctggaggaggtgggtctatgagagtgctgattcttttgtggctgttcacagcctttcctggtgtcctgtctgatgtgcagcttcaggagtcgggacctagcctggtgaaaccttctcagtctctgtccctcacctgcactgtcactggctactcaatcaccagtgattttgcctggaactggatccggcagtttccaggaaacaagctggagtggatgggctacataagttatagtggtaacactaggtacaacccatctctcaaaagtcgaatctctatcactcgagacacatccaagaaccaattcttcctgcagttgaattctgtgactattgaggacacagccacatattactgtgtaacggcgggacgcgggtttccttattggggccaagggactctggtcactgtctctgcacatcatcaccatcaccat

SEQ ID NO: 268 - DNA, 1860 bp, Artificial Sequence
  Description of Artificial Sequence: Synthetic polynucleotide
atgcatctcctcggcccctggctcctgctcctggttctagaatacttggctttctctgactcaagtaaatgggtttttgagcaccctgaaaccctctacgcctgggagggggcctgcgtctggatcccctgcacctacagagccctagatggtgacctggaaagcttcatcctgttccacaatcctgagtataacaagaacacctcgaagtttgatgggacaagactctatgaaagcacaaaggatgggaaggttccttctgagcagaaaagggtgcaattcctgggagacaagaataaggcctgcacactgagtatccacccggtgcacctcaatgacagtggtcagctggggctgaggatggagtccaagactgagaaatggatggaacgaatacacctcaatgtctctgaaaggccttttccacctcatatccagctccctccagaaattcaagagtcccaggaagtcactctgacctgcttgctgaatttctcctgctatgggtatccgatccaattgcagtggctcctagagggggttccaatgaggcaggctgctgtcacctcgacctccttgaccatcaagtctgtcttcacccggagcgagctcaagttctccccacagtggagtcaccatgggaagattgtgacctgccagcttcaggatgcagatgggaagttcctctccaatgacacggtgcagctgaacgtgaagcacaccccgaagttggagatcaaggtcactcccagtgatgccatagtgagggagggggactctgtgaccatgacctgcgaggtcagcagcagcaacccggagtacacgacggtatcctggctcaaggatgggacctcgctgaagaagcagaatacattcacgctaaacctgcgcgaagtgaccaaggaccagagtgggaagtactgctgtcaggtctccaatgacgtgggcccgggaaggtcggaagaagtgttcctgcaagtgcagtatgccccggaaggaggaggtgggtctggaggtggaggatctggtggaggtgggtctggaggaggtgggtctgacatcctgatgacccaatctccatcctccatgtctgtatctctgggagacacagtcagcatcacttgccattcaagtcaggacattaacagtaatatagggtggttgcagcagagaccagggaaatcatttaagggcctgatctatcatggaaccaacttggacgatgaagttccatcaaggttcagtggcagtggatctggagccgattattctctcaccatcagcagcctggaatctgaagattttgcagactattactgtgtacagtatgctcagtttccgtggacgttcggtggaggcaccaagctcgaaatcaaacgtggaggaggtgggtctggaggtggaggatctggtggaggtgggtctggaggaggtgggtctatgagagtgctgattcttttgtggctgttcacagcctttcctggtgtcctgtctgatgtgcagcttcaggagtcgggacctagcctggtgaaaccttctcagtctctgtccctcacctgcactgtcactggctactcaatcaccagtgattttgcctggaactggatccggcagtttccaggaaacaagctggagtggatgggctacataagttatagtggtaacactaggtacaacccatctctcaaaagtcgaatctctatcactcgagacacatccaagaaccaattcttcctgcagttgaattctgtgactattgaggacacagccacatattactgtgtaacggcgggacgcgggtttccttattggggccaagggactctggtcactgtctctgcacatcatcaccatcaccat

SEQ ID NO: 269-270 - skipped (2 entries)

SEQ ID NO: 271 - DNA, 1605 bp, Artificial Sequence
  Description of Artificial Sequence: Synthetic polynucleotide
atgctcaggctgctcttggctctcaacttattcccttcaattcaagtaacaggagacatccagatgacacagactacatcctccctgtctgcctctctgggagacagagtcaccatcagttgcagggcaagtcaggacattagtaaatatttaaattggtatcagcagaaaccagatggaactgttaaactcctgatctaccatacatcaagattacactcaggagtcccatcaaggttcagtggcagtgggtctggaacagattattctctcaccattagcaacctggagcaagaagatattgccacttacttttgccaacagggtaatacgcttccgtacacgttcggaggggggactaagttggaaataacaggaggaggtgggtctggaggtggaggatctggtggaggtgggtctggaggaggtgggtctgaggtgaaactgcaggagtcaggacctggcctggtggcgccctcacagagcctgtccgtcacatgcactgtctcaggggtctcattacccgactatggtgtaagctggattcgccagcctccacgaaagggtctggagtggctgggagtaatatggggtagtgaaaccacatactataattcagctctcaaatccagactgaccatcatcaaggacaactccaagagccaagttttcttaaaaatgaacagtctgcaaactgatgacacagccatttactactgtgccaaacattattactacggtggtagctatgctatggactactggggtcaaggaacctcagtcaccgtctcctcagactacaaagacgatgacgacaagattgaagttatgtatcctcctccttacctagacaatgagaagagcaatggaaccattatccatgtgaaagggaaacacctttgtccaagtcccctatttcccggaccttctaagcccttttgggtgctggtggtggttggtggagtcctggcttgctatagcttgctagtaacagtggcctttattattttctgggtgaggagtaagaggagcaggctcctgcacagtgactacatgaacatgactccccgccgccccgggcccacccgcaagcattaccagccctatgccccaccacgcgacttcgcagcctatcgctccaaacggggcagaaagaaactcctgtatatattcaaacaaccatttatgagaccagtacaaactactcaagaggaagatggctgtagctgccgatttccagaagaagaagaaggaggatgtgaactgagagtgaagttcagcaggagcgcagacgcccccgcgtaccagcagggccagaaccagctctataacgagctcaatctaggacgaagagaggagtacgatgttttggacaagagacgtggccgggaccctgagatggggggaaagccgcagagaaggaagaaccctcaggaaggcctgtacaatgaactgcagaaagataagatggcggaggcctacagtgagattgggatgaaaggcgagcgccggaggggcaaggggcacgatggcctttaccagggtctcagtacagccaccaaggacacctacgacgcccttcacatgcaggccctgccccctcgc

SEQ ID NO: 272 - DNA, 1605 bp, Artificial Sequence; identical to SEQ ID NO: 271
  Description of Artificial Sequence: Synthetic polynucleotide

SEQ ID NO: 273 - DNA, 2232 bp, Artificial Sequence
  Description of Artificial Sequence: Synthetic polynucleotide
tattaatagtaatcaattacggggtcattagttcatagcccatatatggagttccgcgttacataacttacggtaaatggcccgcctggctgaccgcccaacgacccccgcccattgacgtcaataatgacgtatgttcccatagtaacgccaatagggactttccattgacgtcaatgggtggagtatttacggtaaactgcccacttggcagtacatcaagtgtatcatatgccaagtacgccccctattgacgtcaatgacggtaaatggcccgcctggcattatgcccagtacatgaccttatgggactttcctacttggcagtacatctacgtattagtcatcgctattaccatggtgatgcggttttggcagtacatcaatgggcgtggatagcggtttgactcacggggatttccaagtctccaccccattgacgtcaatgggagtttgttttggcaccaaaatcaacgggactttccaaaatgtcgtaacaactccgccccattgacgcaaatgggcggtaggcgtgtacggtgggaggtctatataagcagagctcgcggccgcgccaccatgccacctcctcgcctcctcttcttcctcctcttcctcacccccatggaagtcaggcccgaggaacctctagtggtgaaggtggaagagggagataacgctgtgctgcagtgcctcaaggggacctcagatggccccactcagcagctgacttggtctcgggagtccccgcttaaacccttcttaaaactcagcctggggctgccaggcctgggaatccacatgaggcccctggccatctggcttttcatcttcaacgtctctcaacagatggggggcttctacctgtgccagccggggcccccctctgagaaggcctggcagcctggctggacagtcaatgtggagggcagcggggagctgttccggtggaatgtttcggacctaggtggcctgggctgtggcctgaagaacaggtcctcagagggccccagctccccttccgggaagctcatgagccccaagctgtatgtgtgggccaaagaccgccctgagatctgggagggagagcctccgtgtctcccaccgagggacagcctgaaccagagcctcagccaggacctcaccatggcccctggctccacactctggctgtcctgtggggtaccccctgactctgtgtccaggggccccctctcctggacccatgtgcaccccaaggggcctaagtcattgctgagcctagagctgaaggacgatcgcccggccagagatatgtgggtaatggagacgggtctgttgttgccccgggccacagctcaagacgctggaaagtattattgtcaccgtggcaacctgaccatgtcattccacctggagatcactgctcggccagggggaggtgggtctggaggtggaggatctggtggaggtgggtctggtggaggtgggtctgaggtgcagctggtggagtctggtggtggtcttgttcaacccggtggttctcttcgtctttcttgtgctgcttctggttttaatattaaagatacttatattcattgggttcgtcaagctcctggtaaaggtcttgaatgggttgctcgtatttatcctactaatggttatactcgttatgctgattctgttaaaggtcgttttactatttctgctgatacttctaaaaatactgcttatcttcaaatgaactctcttcgtgctgaagatactgctgtttattattgttctcgttggggtggtgatggtttttatgctatggattattggggtcaaggtactcttgtcaccgtctcctcagctagcaccgggggaggtgggtctggaggtggaggatctggtggaggtgggtctgacatccagatgacccagtctccttcttctctttctgcttctgttggtgatcgtgttactattacttgtcgtgcttctcaagatgttaatactgctgttgcttggtatcaacaaaaacccggtaaagctcctaaacttcttatttattctgcttcttttctttattctggtgttccttctcgtttttctggttctcgttctggtactgattttactcttactatttcttctcttcaacctgaagattttgctacttattattgtcaacaacattatactactcctcctacttttggtcaaggtaccaaggtggagatcaaacgtacgcatcatcaccatcaccat

SEQ ID NO: 274 - DNA, 2434 bp, Artificial Sequence
  Description of Artificial Sequence: Synthetic polynucleotide
gggagaagctagacttaaaatcttccattgcagctgtaaacacatctggacaatagtctgttttctgcatttgtgaatcccacacccatggaactatgaatcgtgcatcagagttatttaaaaccaccgtgcatggagtgaaccaataccgaggtgtttgcttatcattttcctttgagcacacagcacagccttgaactcagtgacactcctaagagggctctagggtcaggccaacttagatgagatgctagtctttagctaaagatgcccttccacccccgttgcacgaccttgcttctcagtctttgttgagtcttctgggggagaatccccctagaggactcagtttacaaaaccctaagtgagaccactgccaagaagtgcttgctcacccctcctgccgcggcagggaatccccctttccttgtacaggcaaaacacaaaaaaggactcataagtgaagcctgatccttctcaccaaacactgcccacacctcctagtaattgaacttgaaaaaaaaaactggtttgaaaaattaccgcaaaccatattgtcataaaaaaaaaaaaaaacacttcctatatgagatcacagaacagagtaggcacaagttcctgctgagcagatcagcctaatgcttaaatagaacaactcctggctgtcattgacattgtctaaaagccaagatgacagactgagaggcctgagcccttgttctggcattctcccaggaagatgcagtaaaggggttgacccaatatacgcggccgcgccaccatgccacctcctcgcctcctcttcttcctcctcttcctcacccccatggaagtcaggcccgaggaacctctagtggtgaaggtggaagagggagataacgctgtgctgcagtgcctcaaggggacctcagatggccccactcagcagctgacttggtctcgggagtccccgcttaaacccttcttaaaactcagcctggggctgccaggcctgggaatccacatgaggcccctggccatctggcttttcatcttcaacgtctctcaacagatggggggcttctacctgtgccagccggggcccccctctgagaaggcctggcagcctggctggacagtcaatgtggagggcagcggggagctgttccggtggaatgtttcggacctaggtggcctgggctgtggcctgaagaacaggtcctcagagggccccagctccccttccgggaagctcatgagccccaagctgtatgtgtgggccaaagaccgccctgagatctgggagggagagcctccgtgtctcccaccgagggacagcctgaaccagagcctcagccaggacctcaccatggcccctggctccacactctggctgtcctgtggggtaccccctgactctgtgtccaggggccccctctcctggacccatgtgcaccccaaggggcctaagtcattgctgagcctagagctgaaggacgatcgcccggccagagatatgtgggtaatggagacgggtctgttgttgccccgggccacagctcaagacgctggaaagtattattgtcaccgtggcaacctgaccatgtcattccacctggagatcactgctcggccagggggaggtgggtctggaggtggaggatctggtggaggtgggtctggtggaggtgggtctgaggtgcagctggtggagtctggtggtggtcttgttcaacccggtggttctcttcgtctttcttgtgctgcttctggttttaatattaaagatacttatattcattgggttcgtcaagctcctggtaaaggtcttgaatgggttgctcgtatttatcctactaatggttatactcgttatgctgattctgttaaaggtcgttttactatttctgctgatacttctaaaaatactgcttatcttcaaatgaactctcttcgtgctgaagatactgctgtttattattgttctcgttggggtggtgatggtttttatgctatggattattggggtcaaggtactcttgtcaccgtctcctcagctagcaccgggggaggtgggtctggaggtggaggatctggtggaggtgggtctgacatccagatgacccagtctccttcttctctttctgcttctgttggtgatcgtgttactattacttgtcgtgcttctcaagatgttaatactgctgttgcttggtatcaacaaaaacccggtaaagctcctaaacttcttatttattctgcttcttttctttattctggtgttccttctcgtttttctggttctcgttctggtactgattttactcttactatttcttctcttcaacctgaagattttgctacttattattgtcaacaacattatactactcctcctacttttggtcaaggtaccaaggtggagatcaaacgtacgcatcatcaccatcaccat

SEQ ID NO: 275 - DNA, 1998 bp, Artificial Sequence
  Description of Artificial Sequence: Synthetic polynucleotide
aatttaaggcaggatgtctcagagtctgggaaaatcccactttcctcctgctacaccttacagttgtgagaaagcacatttcagacaacagggaaaacccatacttcaccacaacaacacactatacattgtctggtccactggagcataaattaaagagaaacaatgtagtcaagcaagtaggcggcaagaggaagggggcggagacatcatcagggagtataaactctgagatgcctcagagcctcacagactcaacaagagctccagcaaagactttcactgtagcttgacttgacctgagattaactagggaatcttgagaataaaggcggccgcgccaccatgccacctcctcgcctcctcttcttcctcctcttcctcacccccatggaagtcaggcccgaggaacctctagtggtgaaggtggaagagggagataacgctgtgctgcagtgcctcaaggggacctcagatggccccactcagcagctgacttggtctcgggagtccccgcttaaacccttcttaaaactcagcctggggctgccaggcctgggaatccacatgaggcccctggccatctggcttttcatcttcaacgtctctcaacagatggggggcttctacctgtgccagccggggcccccctctgagaaggcctggcagcctggctggacagtcaatgtggagggcagcggggagctgttccggtggaatgtttcggacctaggtggcctgggctgtggcctgaagaacaggtcctcagagggccccagctccccttccgggaagctcatgagccccaagctgtatgtgtgggccaaagaccgccctgagatctgggagggagagcctccgtgtctcccaccgagggacagcctgaaccagagcctcagccaggacctcaccatggcccctggctccacactctggctgtcctgtggggtaccccctgactctgtgtccaggggccccctctcctggacccatgtgcaccccaaggggcctaagtcattgctgagcctagagctgaaggacgatcgcccggccagagatatgtgggtaatggagacgggtctgttgttgccccgggccacagctcaagacgctggaaagtattattgtcaccgtggcaacctgaccatgtcattccacctggagatcactgctcggccagggggaggtgggtctggaggtggaggatctggtggaggtgggtctggtggaggtgggtctgaggtgcagctggtggagtctggtggtggtcttgttcaacccggtggttctcttcgtctttcttgtgctgcttctggttttaatattaaagatacttatattcattgggttcgtcaagctcctggtaaaggtcttgaatgggttgctcgtatttatcctactaatggttatactcgttatgctgattctgttaaaggtcgttttactatttctgctgatacttctaaaaatactgcttatcttcaaatgaactctcttcgtgctgaagatactgctgtttattattgttctcgttggggtggtgatggtttttatgctatggattattggggtcaaggtactcttgtcaccgtctcctcagctagcaccgggggaggtgggtctggaggtggaggatctggtggaggtgggtctgacatccagatgacccagtctccttcttctctttctgcttctgttggtgatcgtgttactattacttgtcgtgcttctcaagatgttaatactgctgttgcttggtatcaacaaaaacccggtaaagctcctaaacttcttatttattctgcttcttttctttattctggtgttccttctcgtttttctggttctcgttctggtactgattttactcttactatttcttctcttcaacctgaagattttgctacttattattgtcaacaacattatactactcctcctacttttggtcaaggtaccaaggtggagatcaaacgtacgcatcatcaccatcaccat

SEQ ID NO: 276 - DNA, 2705 bp, Artificial Sequence
  Description of Artificial Sequence: Synthetic polynucleotide
taacgaagacagggccatgtagagggccccagggagtgaaagggcctccaggacctccaggtatggaatacaggggacgtttaagaagatatggccacacactggggccctgagaagtgagagcttcatgaaaaaaatcagggaccccagagttccttggaagccaagactgaaaccagcattatgagtctccgggtcagaatgaaagaagaaggcctgccccagtggggtctgtgaattcccgggggtgatttcactccccggggctgtcccaggcttgtccctgctacccccacccagcctttcctgaggcctcaagcctgccaccaagcccccagctccttctccccgcagggacccaaacacaggcctcgggactcaacacagcttttccctccaaccccgttttctctccctcaaggactcagctttctgaggcccctcccagttctagttctatctttttcctgcatcctgtctggaagttagaaggaaacagaccacagacccggtccccaaaagaaatggaggcaataggttttgaggggcatggggacggggttcagcctccagggtcctacacacaaatcagtcagtggcccagaagaccccctcggaatcggagcagggaggatggggagtgtgaggggtatccttgatgcttgtgtgtccccaactttccaaatccccgcccccgcgatggagaagaaaccgagacagaaggtgcagggcccactaccgcttcctccagatgagctcatgggtttctccaccaaggaagttttccgctggttgaatgattctttccccgccctcctctcgccccagggacatataaaggcagttgttggcacacccagccagcagacgctccctcagcaaggacagcagaggaccagctaagagggagagaagcaactacagaccccccctgaaaacaaccctcagacgccacatcccctgacaagctgccaggcaggttctcttcctctcacatactgacccacggctccaccctctctcccctggaaaggacacgcggccgcgccaccatgccacctcctcgcctcctcttcttcctcctcttcctcacccccatggaagtcaggcccgaggaacctctagtggtgaaggtggaagagggagataacgctgtgctgcagtgcctcaaggggacctcagatggccccactcagcagctgacttggtctcgggagtccccgcttaaacccttcttaaaactcagcctggggctgccaggcctgggaatccacatgaggcccctggccatctggcttttcatcttcaacgtctctcaacagatggggggcttctacctgtgccagccggggcccccctctgagaaggcctggcagcctggctggacagtcaatgtggagggcagcggggagctgttccggtggaatgtttcggacctaggtggcctgggctgtggcctgaagaacaggtcctcagagggccccagctccccttccgggaagctcatgagccccaagctgtatgtgtgggccaaagaccgccctgagatctgggagggagagcctccgtgtctcccaccgagggacagcctgaaccagagcctcagccaggacctcaccatggcccctggctccacactctggctgtcctgtggggtaccccctgactctgtgtccaggggccccctctcctggacccatgtgcaccccaaggggcctaagtcattgctgagcctagagctgaaggacgatcgcccggccagagatatgtgggtaatggagacgggtctgttgttgccccgggccacagctcaagacgctggaaagtattattgtcaccgtggcaacctgaccatgtcattccacctggagatcactgctcggccagggggaggtgggtctggaggtggaggatctggtggaggtgggtctggtggaggtgggtctgaggtgcagctggtggagtctggtggtggtcttgttcaacccggtggttctcttcgtctttcttgtgctgcttctggttttaatattaaagatacttatattcattgggttcgtcaagctcctggtaaaggtcttgaatgggttgctcgtatttatcctactaatggttatactcgttatgctgattctgttaaaggtcgttttactatttctgctgatacttctaaaaatactgcttatcttcaaatgaactctcttcgtgctgaagatactgctgtttattattgttctcgttggggtggtgatggtttttatgctatggattattggggtcaaggtactcttgtcaccgtctcctcagctagcaccgggggaggtgggtctggaggtggaggatctggtggaggtgggtctgacatccagatgacccagtctccttcttctctttctgcttctgttggtgatcgtgttactattacttgtcgtgcttctcaagatgttaatactgctgttgcttggtatcaacaaaaacccggtaaagctcctaaacttcttatttattctgcttcttttctttattctggtgttccttctcgtttttctggttctcgttctggtactgattttactcttactatttcttctcttcaacctgaagattttgctacttattattgtcaacaacattatactactcctcctacttttggtcaaggtaccaaggtggagatcaaacgtacgcatcatcaccatcaccat

SEQ ID NO: 277 - DNA, 2030 bp, Artificial Sequence
  Description of Artificial Sequence: Synthetic polynucleotide
gatatcgaattaggaggaaaactgtttcatacagaaggcgtcaattaggaggaaaaactgtttcatacagaaggcgtcaattaggaggaaaaactgtttcatacagaaggcgtcaattggtcccatcgaattaggaggaaaaactgtttcatacagaaggcgtcaattaggaggaaaaactgtttcatacagaaggcgtcaattaggaggaaaaactgtttcatacagaaggcgtcaattggtcccgggacattttgacacccccataatatttttccagaattaacagtataaattgcatctcttgttcaagagttccctatcactctctttaatcactactcacagtaacctcaactcctggcggccgcgccaccatgccacctcctcgcctcctcttcttcctcctcttcctcacccccatggaagtcaggcccgaggaacctctagtggtgaaggtggaagagggagataacgctgtgctgcagtgcctcaaggggacctcagatggccccactcagcagctgacttggtctcgggagtccccgcttaaacccttcttaaaactcagcctggggctgccaggcctgggaatccacatgaggcccctggccatctggcttttcatcttcaacgtctctcaacagatggggggcttctacctgtgccagccggggcccccctctgagaaggcctggcagcctggctggacagtcaatgtggagggcagcggggagctgttccggtggaatgtttcggacctaggtggcctgggctgtggcctgaagaacaggtcctcagagggccccagctccccttccgggaagctcatgagccccaagctgtatgtgtgggccaaagaccgccctgagatctgggagggagagcctccgtgtctcccaccgagggacagcctgaaccagagcctcagccaggacctcaccatggcccctggctccacactctggctgtcctgtggggtaccccctgactctgtgtccaggggccccctctcctggacccatgtgcaccccaaggggcctaagtcattgctgagcctagagctgaaggacgatcgcccggccagagatatgtgggtaatggagacgggtctgttgttgccccgggccacagctcaagacgctggaaagtattattgtcaccgtggcaacctgaccatgtcattccacctggagatcactgctcggccagggggaggtgggtctggaggtggaggatctggtggaggtgggtctggtggaggtgggtctgaggtgcagctggtggagtctggtggtggtcttgttcaacccggtggttctcttcgtctttcttgtgctgcttctggttttaatattaaagatacttatattcattgggttcgtcaagctcctggtaaaggtcttgaatgggttgctcgtatttatcctactaatggttatactcgttatgctgattctgttaaaggtcgttttactatttctgctgatacttctaaaaatactgcttatcttcaaatgaactctcttcgtgctgaagatactgctgtttattattgttctcgttggggtggtgatggtttttatgctatggattattggggtcaaggtactcttgtcaccgtctcctcagctagcaccgggggaggtgggtctggaggtggaggatctggtggaggtgggtctgacatccagatgacccagtctccttcttctctttctgcttctgttggtgatcgtgttactattacttgtcgtgcttctcaagatgttaatactgctgttgcttggtatcaacaaaaacccggtaaagctcctaaacttcttatttattctgcttcttttctttattctggtgttccttctcgtttttctggttctcgttctggtactgattttactcttactatttcttctcttcaacctgaagattttgctacttattattgtcaacaacattatactactcctcctacttttggtcaaggtaccaaggtggagatcaaacgtacgcatcatcaccatcaccat

SEQ ID NO: 278 - DNA, 1515 bp, Artificial Sequence
  Description of Artificial Sequence: Synthetic polynucleotide
atggattttcaggtgcagattttcagcttcctgctaatcagtgcctcagtcataatgtctagaatggcccaggtcaaactacaggagtcaggggctgagctggtgaagcctggggcctcagtgaagatgtcctgcaaggcttctggctacacatttaccagttacaatatgcactgggtaaagcagacacctggacagggcctggaatggattggagctatttatccaggaaatggtgatacttcctacaatcagaagttcaaaggcaaggccacattgactgcagacaaatcctccagcacagcctacatgcagctcagcagcctgacatctgaggactctgcggactattactgtgcaagatctaattattacggtagtagctactggttcttcgatgtctggggccaagggaccacggtcaccgtctcctcaggtggaggcggttcaggcggaggtggctctggcggtggcggatcggacatcgagctcactcagtctccaacaatcctgtctgcatctccaggggagaaggtcacaatgacttgcagggccagctcaagtgtaaattacatggactggtaccagaagaagccaggatcctcccccaaaccctggatttatgccacatccaacctggcttctggagtccctgctcgcttcagtggcagtgggtctgggacctcttactctctcacaatcagcagagtggaggctgaagatgctgccacttattactgccagcagtggagttttaatccacccacgttcggaggggggacaaagttggaaataaaacgggccgccgctggtgatcccgccgagcccaaatctcctgacaaaactcacacatgcccaccgtgcccagcacctgaactcctggggggaccgtcagtcttcctcttccccccaaaacccaaggacaccctcatgatctcccggacccctgaggtcacatgcgtggtggtggacgtgagccacgaagaccctgaggtcaagttcaactggtacgtggacggcgtggaggtgcataatgccaagacaaagccgcgggaggagcagtacaacagcacgtaccgtgtggtcagcgtcctcaccgtcctgcaccaggactggctgaatggcaaggagtacaagtgcaaggtctccaacaaagccctcccagcccccatcgagaaaaccatctccaaagccaaagggcagccccgagaaccacaggtgtacaccctgcccccatcccgggaggagatgaccaagaaccaggtcagcctgacctgcctggtcaaaggcttctatcccagcgacatcgccgtggagtgggagagcaatgggcagccggagaacaactacaagaccacgcctcccgtgctggactccgacggctccttcttcctctacagcaagctcaccgtggacaagagcaggtggcagcaggggaacgtcttctcatgctccgtgatgcacgaggctctgcacaaccactacacgcagaagagcctctccctgtctccgggt

SEQ ID NO: 279 - DNA, 828 bp, Artificial Sequence
  Description of Artificial Sequence: Synthetic polynucleotide
atggattttcaggtgcagattttcagcttcctgctaatcagtgcctcagtcataatgtctagaatggcccaggtcaaactacaggagtcaggggctgagctggtgaagcctggggcctcagtgaagatgtcctgcaaggcttctggctacacatttaccagttacaatatgcactgggtaaagcagacacctggacagggcctggaatggattggagctatttatccaggaaatggtgatacttcctacaatcagaagttcaaaggcaaggccacattgactgcagacaaatcctccagcacagcctacatgcagctcagcagcctgacatctgaggactctgcggactattactgtgcaagatctaattattacggtagtagctactggttcttcgatgtctggggccaagggaccacggtcaccgtctcctcaggtggaggcggttcaggcggaggtggctctggcggtggcggatcggacatcgagctcactcagtctccaacaatcctgtctgcatctccaggggagaaggtcacaatgacttgcagggccagctcaagtgtaaattacatggactggtaccagaagaagccaggatcctcccccaaaccctggatttatgccacatccaacctggcttctggagtccctgctcgcttcagtggcagtgggtctgggacctcttactctctcacaatcagcagagtggaggctgaagatgctgccacttattactgccagcagtggagttttaatccacccacgttcggaggggggacaaagttggaaataaaacgggccgccgctcatcatcaccatcaccat

SEQ ID NO: 280 - DNA, 1515 bp, Artificial Sequence
  Description of Artificial Sequence: Synthetic polynucleotide
atggattttcaggtgcagattttcagcttcctgctaatcagtgcctcagtcataatgtctagagacatcgagctcactcagtctccaacaatcctgtctgcatctccaggggagaaggtcacaatgacttgcagggccagctcaagtgtaaattacatggactggtaccagaagaagccaggatcctcccccaaaccctggatttatgccacatccaacctggcttctggagtccctgctcgcttcagtggcagtgggtctgggacctcttactctctcacaatcagcagagtggaggctgaagatgctgccacttattactgccagcagtggagttttaatccacccacgttcggaggggggacaaagttggaaataaaacggggtggaggcggttcaggcggaggtggctctggcggtggcggatcgatggcccaggtcaaactacaggagtcaggggctgagctggtgaagcctggggcctcagtgaagatgtcctgcaaggcttctggctacacatttaccagttacaatatgcactgggtaaagcagacacctggacagggcctggaatggattggagctatttatccaggaaatggtgatacttcctacaatcagaagttcaaaggcaaggccacattgactgcagacaaatcctccagcacagcctacatgcagctcagcagcctgacatctgaggactctgcggactattactgtgcaagatctaattattacggtagtagctactggttcttcgatgtctggggccaagggaccacggtcaccgtctcctcagccgccgctggtgatcccgccgagcccaaatctcctgacaaaactcacacatgcccaccgtgcccagcacctgaactcctggggggaccgtcagtcttcctcttccccccaaaacccaaggacaccctcatgatctcccggacccctgaggtcacatgcgtggtggtggacgtgagccacgaagaccctgaggtcaagttcaactggtacgtggacggcgtggaggtgcataatgccaagacaaagccgcgggaggagcagtacaacagcacgtaccgtgtggtcagcgtcctcaccgtcctgcaccaggactggctgaatggcaaggagtacaagtgcaaggtctccaacaaagccctcccagcccccatcgagaaaaccatctccaaagccaaagggcagccccgagaaccacaggtgtacaccctgcccccatcccgggaggagatgaccaagaaccaggtcagcctgacctgcctggtcaaaggcttctatcccagcgacatcgccgtggagtgggagagcaatgggcagccggagaacaactacaagaccacgcctcccgtgctggactccgacggctccttcttcctctacagcaagctcaccgtggacaagagcaggtggcagcaggggaacgtcttctcatgctccgtgatgcacgaggctctgcacaaccactacacgcagaagagcctctccctgtctccgggt

SEQ ID NO: 281 - DNA, 828 bp, Artificial Sequence
  Description of Artificial Sequence: Synthetic polynucleotide
atggattttcaggtgcagattttcagcttcctgctaatcagtgcctcagtcataatgtctagagacatcgagctcactcagtctccaacaatcctgtctgcatctccaggggagaaggtcacaatgacttgcagggccagctcaagtgtaaattacatggactggtaccagaagaagccaggatcctcccccaaaccctggatttatgccacatccaacctggcttctggagtccctgctcgcttcagtggcagtgggtctgggacctcttactctctcacaatcagcagagtggaggctgaagatgctgccacttattactgccagcagtggagttttaatccacccacgttcggaggggggacaaagttggaaataaaacggggtggaggcggttcaggcggaggtggctctggcggtggcggatcgatggcccaggtcaaactacaggagtcaggggctgagctggtgaagcctggggcctcagtgaagatgtcctgcaaggcttctggctacacatttaccagttacaatatgcactgggtaaagcagacacctggacagggcctggaatggattggagctatttatccaggaaatggtgatacttcctacaatcagaagttcaaaggcaaggccacattgactgcagacaaatcctccagcacagcctacatgcagctcagcagcctgacatctgaggactctgcggactattactgtgcaagatctaattattacggtagtagctactggttcttcgatgtctggggccaagggaccacggtcaccgtctcctcagccgccgctcatcatcaccatcaccat

SEQ ID NO: 282 - DNA, 2346 bp, Artificial Sequence
  Description of Artificial Sequence: Synthetic polynucleotide
atgccacctcctcgcctcctcttcttcctcctcttcctcacccccatggaagtcaggcccgaggaacctctagtggtgaaggtggaagagggagataacgctgtgctgcagtgcctcaaggggacctcagatggccccactcagcagctgacctggtctcgggagtccccgcttaaacccttcttaaaactcagcctggggctgccaggcctgggaatccacatgaggcccctggccatctggcttttcatcttcaacgtctctcaacagatggggggcttctacctgtgccagccggggcccccctctgagaaggcctggcagcctggctggacagtcaatgtggagggcagcggggagctgttccggtggaatgtttcggacctaggtggcctgggctgtggcctgaagaacaggtcctcagagggccccagctccccttccgggaagctcatgagccccaagctgtatgtgtgggccaaagaccgccctgagatctgggagggagagcctccgtgtctcccaccgagggacagcctgaaccagagcctcagccaggacctcaccatggcccctggctccacactctggctgtcctgtggggtaccccctgactctgtgtccaggggccccctctcctggacccatgtgcaccccaaggggcctaagtcattgctgagcctagagctgaaggacgatcgcccggccagagatatgtgggtaatggagacgggtctgttgttgccccgggccacagctcaagacgctggaaagtattattgtcaccgtggcaacctgaccatgtcattccacctggagatcactgctcggccaggaggaggtgggtctggaggtggaggatctggtggaggtgggtctggaggaggtgggtctatggcccaggtcaaactacaggagtcaggggctgagctggtgaagcctggggcctcagtgaagatgtcctgcaaggcttctggctacacatttaccagttacaatatgcactgggtaaagcagacacctggacagggcctggaatggattggagctatttatccaggaaatggtgatacttcctacaatcagaagttcaaaggcaaggccacattgactgcagacaaatcctccagcacagcctacatgcagctcagcagcctgacatctgaggactctgcggactattactgtgcaagatctaattattacggtagtagctactggttcttcgatgtctggggccaagggaccacggtcaccgtctcctcaggtggaggcggttcaggcggaggtggctctggcggtggcggatcggacatcgagctcactcagtctccaacaatcctgtctgcatctccaggggagaaggtcacaatgacttgcagggccagctcaagtgtaaattacatggactggtaccagaagaagccaggatcctcccccaaaccctggatttatgccacatccaacctggcttctggagtccctgctcgcttcagtggcagtgggtctgggacctcttactctctcacaatcagcagagtggaggctgaagatgctgccacttattactgccagcagtggagttttaatccacccacgttcggaggggggacaaagttggaaataaaacgggccgccgctggtgatcccgccgagcccaaatctcctgacaaaactcacacatgcccaccgtgcccagcacctgaactcctggggggaccgtcagtcttcctcttccccccaaaacccaaggacaccctcatgatctcccggacccctgaggtcacatgcgtggtggtggacgtgagccacgaagaccctgaggtcaagttcaactggtacgtggacggcgtggaggtgcataatgccaagacaaagccgcgggaggagcagtacaacagcacgtaccgtgtggtcagcgtcctcaccgtcctgcaccaggactggctgaatggcaaggagtacaagtgcaaggtctccaacaaagccctcccagcccccatcgagaaaaccatctccaaagccaaagggcagccccgagaaccacaggtgtacaccctgcccccatcccgggaggagatgaccaagaaccaggtcagcctgacctgcctggtcaaaggcttctatcccagcgacatcgccgtggagtgggagagcaatgggcagccggagaacaactacaagaccacgcctcccgtgctggactccgacggctccttcttcctctacagcaagctcaccgtggacaagagcaggtggcagcaggggaacgtcttctcatgctccgtgatgcacgaggctctgcacaaccactacacgcagaagagcctctccctgtctccgggt

SEQ ID NO: 283 - DNA, 1659 bp, Artificial Sequence
  Description of Artificial Sequence: Synthetic polynucleotide
atgccacctcctcgcctcctcttcttcctcctcttcctcacccccatggaagtcaggcccgaggaacctctagtggtgaaggtggaagagggagataacgctgtgctgcagtgcctcaaggggacctcagatggccccactcagcagctgacctggtctcgggagtccccgcttaaacccttcttaaaactcagcctggggctgccaggcctgggaatccacatgaggcccctggccatctggcttttcatcttcaacgtctctcaacagatggggggcttctacctgtgccagccggggcccccctctgagaaggcctggcagcctggctggacagtcaatgtggagggcagcggggagctgttccggtggaatgtttcggacctaggtggcctgggctgtggcctgaagaacaggtcctcagagggccccagctccccttccgggaagctcatgagccccaagctgtatgtgtgggccaaagaccgccctgagatctgggagggagagcctccgtgtctcccaccgagggacagcctgaaccagagcctcagccaggacctcaccatggcccctggctccacactctggctgtcctgtggggtaccccctgactctgtgtccaggggccccctctcctggacccatgtgcaccccaaggggcctaagtcattgctgagcctagagctgaaggacgatcgcccggccagagatatgtgggtaatggagacgggtctgttgttgccccgggccacagctcaagacgctggaaagtattattgtcaccgtggcaacctgaccatgtcattccacctggagatcactgctcggccaggaggaggtgggtctggaggtggaggatctggtggaggtgggtctggaggaggtgggtctatggcccaggtcaaactacaggagtcaggggctgagctggtgaagcctggggcctcagtgaagatgtcctgcaaggcttctggctacacatttaccagttacaatatgcactgggtaaagcagacacctggacagggcctggaatggattggagctatttatccaggaaatggtgatacttcctacaatcagaagttcaaaggcaaggccacattgactgcagacaaatcctccagcacagcctacatgcagctcagcagcctgacatctgaggactctgcggactattactgtgcaagatctaattattacggtagtagctactggttcttcgatgtctggggccaagggaccacggtcaccgtctcctcaggtggaggcggttcaggcggaggtggctctggcggtggcggatcggacatcgagctcactcagtctccaacaatcctgtctgcatctccaggggagaaggtcacaatgacttgcagggccagctcaagtgtaaattacatggactggtaccagaagaagccaggatcctcccccaaaccctggatttatgccacatccaacctggcttctggagtccctgctcgcttcagtggcagtgggtctgggacctcttactctctcacaatcagcagagtggaggctgaagatgctgccacttattactgccagcagtggagttttaatccacccacgttcggaggggggacaaagttggaaataaaacgggccgccgctcatcatcaccatcaccat

SEQ ID NO: 284 - DNA, 2346 bp, Artificial Sequence
  Description of Artificial Sequence: Synthetic polynucleotide
atgccacctcctcgcctcctcttcttcctcctcttcctcacccccatggaagtcaggcccgaggaacctctagtggtgaaggtggaagagggagataacgctgtgctgcagtgcctcaaggggacctcagatggccccactcagcagctgacctggtctcgggagtccccgcttaaacccttcttaaaactcagcctggggctgccaggcctgggaatccacatgaggcccctggccatctggcttttcatcttcaacgtctctcaacagatggggggcttctacctgtgccagccggggcccccctctgagaaggcctggcagcctggctggacagtcaatgtggagggcagcggggagctgttccggtggaatgtttcggacctaggtggcctgggctgtggcctgaagaacaggtcctcagagggccccagctccccttccgggaagctcatgagccccaagctgtatgtgtgggccaaagaccgccctgagatctgggagggagagcctccgtgtctcccaccgagggacagcctgaaccagagcctcagccaggacctcaccatggcccctggctccacactctggctgtcctgtggggtaccccctgactctgtgtccaggggccccctctcctggacccatgtgcaccccaaggggcctaagtcattgctgagcctagagctgaaggacgatcgcccggccagagatatgtgggtaatggagacgggtctgttgttgccccgggccacagctcaagacgctggaaagtattattgtcaccgtggcaacctgaccatgtcattccacctggagatcactgctcggccaggaggaggtgggtctggaggtggaggatctggtggaggtgggtctggaggaggtgggtctgacatcgagctcactcagtctccaacaatcctgtctgcatctccaggggagaaggtcacaatgacttgcagggccagctcaagtgtaaattacatggactggtaccagaagaagccaggatcctcccccaaaccctggatttatgccacatccaacctggcttctggagtccctgctcgcttcagtggcagtgggtctgggacctcttactctctcacaatcagcagagtggaggctgaagatgctgccacttattactgccagcagtggagttttaatccacccacgttcggaggggggacaaagttggaaataaaacggggtggaggcggttcaggcggaggtggctctggcggtggcggatcgatggcccaggtcaaactacaggagtcaggggctgagctggtgaagcctggggcctcagtgaagatgtcctgcaaggcttctggctacacatttaccagttacaatatgcactgggtaaagcagacacctggacagggcctggaatggattggagctatttatccaggaaatggtgatacttcctacaatcagaagttcaaaggcaaggccacattgactgcagacaaatcctccagcacagcctacatgcagctcagcagcctgacatctgaggactctgcggactattactgtgcaagatctaattattacggtagtagctactggttcttcgatgtctggggccaagggaccacggtcaccgtctcctcagccgccgctggtgatcccgccgagcccaaatctcctgacaaaactcacacatgcccaccgtgcccagcacctgaactcctggggggaccgtcagtcttcctcttccccccaaaacccaaggacaccctcatgatctcccggacccctgaggtcacatgcgtggtggtggacgtgagccacgaagaccctgaggtcaagttcaactggtacgtggacggcgtggaggtgcataatgccaagacaaagccgcgggaggagcagtacaacagcacgtaccgtgtggtcagcgtcctcaccgtcctgcaccaggactggctgaatggcaaggagtacaagtgcaaggtctccaacaaagccctcccagcccccatcgagaaaaccatctccaaagccaaagggcagccccgagaaccacaggtgtacaccctgcccccatcccgggaggagatgaccaagaaccaggtcagcctgacctgcctggtcaaaggcttctatcccagcgacatcgccgtggagtgggagagcaatgggcagccggagaacaactacaagaccacgcctcccgtgctggactccgacggctccttcttcctctacagcaagctcaccgtggacaagagcaggtggcagcaggggaacgtcttctcatgctccgtgatgcacgaggctctgcacaaccactacacgcagaagagcctctccctgtctccgggt

SEQ ID NO: 285 - DNA, 1659 bp, Artificial Sequence
  Description of Artificial Sequence: Synthetic polynucleotide
atgccacctcctcgcctcctcttcttcctcctcttcctcacccccatggaagtcaggcccgaggaacctctagtggtgaaggtggaagagggagataacgctgtgctgcagtgcctcaaggggacctcagatggccccactcagcagctgacctggtctcgggagtccccgcttaaacccttcttaaaactcagcctggggctgccaggcctgggaatccacatgaggcccctggccatctggcttttcatcttcaacgtctctcaacagatggggggcttctacctgtgccagccggggcccccctctgagaaggcctggcagcctggctggacagtcaatgtggagggcagcggggagctgttccggtggaatgtttcggacctaggtggcctgggctgtggcctgaagaacaggtcctcagagggccccagctccccttccgggaagctcatgagccccaagctgtatgtgtgggccaaagaccgccctgagatctgggagggagagcctccgtgtctcccaccgagggacagcctgaaccagagcctcagccaggacctcaccatggcccctggctccacactctggctgtcctgtggggtaccccctgactctgtgtccaggggccccctctcctggacccatgtgcaccccaaggggcctaagtcattgctgagcctagagctgaaggacgatcgcccggccagagatatgtgggtaatggagacgggtctgttgttgccccgggccacagctcaagacgctggaaagtattattgtcaccgtggcaacctgaccatgtcattccacctggagatcactgctcggccaggaggaggtgggtctggaggtggaggatctggtggaggtgggtctggaggaggtgggtctgacatcgagctcactcagtctccaacaatcctgtctgcatctccaggggagaaggtcacaatgacttgcagggccagctcaagtgtaaattacatggactggtaccagaagaagccaggatcctcccccaaaccctggatttatgccacatccaacctggcttctggagtccctgctcgcttcagtggcagtgggtctgggacctcttactctctcacaatcagcagagtggaggctgaagatgctgccacttattactgccagcagtggagttttaatccacccacgttcggaggggggacaaagttggaaataaaacggggtggaggcggttcaggcggaggtggctctggcggtggcggatcgatggcccaggtcaaactacaggagtcaggggctgagctggtgaagcctggggcctcagtgaagatgtcctgcaaggcttctggctacacatttaccagttacaatatgcactgggtaaagcagacacctggacagggcctggaatggattggagctatttatccaggaaatggtgatacttcctacaatcagaagttcaaaggcaaggccacattgactgcagacaaatcctccagcacagcctacatgcagctcagcagcctgacatctgaggactctgcggactattactgtgcaagatctaattattacggtagtagctactggttcttcgatgtctggggccaagggaccacggtcaccgtctcctcagccgccgctcatcatcaccatcaccat

SEQ ID NO: 286 - DNA, 1671 bp, Artificial Sequence
  Description of Artificial Sequence: Synthetic polynucleotide
atgccacctcctcgcctcctcttcttcctcctcttcctcacccccatggaagtcaggcccgaggaacctctagtggtgaaggtggaagagggagataacgctgtgctgcagtgcctcaaggggacctcagatggccccactcagcagctgacctggtctcgggagtccccgcttaaacccttcttaaaactcagcctggggctgccaggcctgggaatccacatgaggcccctggccatctggcttttcatcttcaacgtctctcaacagatggggggcttctacctgtgccagccggggcccccctctgagaaggcctggcagcctggctggacagtcaatgtggagggcagcggggagctgttccggtggaatgtttcggacctaggtggcctgggctgtggcctgaagaacaggtcctcagagggccccagctccccttccgggaagctcatgagccccaagctgtatgtgtgggccaaagaccgccctgagatctgggagggagagcctccgtgtctcccaccgagggacagcctgaaccagagcctcagccaggacctcaccatggcccctggctccacactctggctgtcctgtggggtaccccctgactctgtgtccaggggccccctctcctggacccatgtgcaccccaaggggcctaagtcattgctgagcctagagctgaaggacgatcgcccggccagagatatgtgggtaatggagacgggtctgttgttgccccgggccacagctcaagacgctggaaagtattattgtcaccgtggcaacctgaccatgtcattccacctggagatcactgctcggccaggaggaggtgggtctggaggtggaggatctggtggaggtgggtctggaggaggtgggtctcaggtgcagctggtgcagagcggcgccgaggacaagaagcccggcgagagcgtgaagatcagctgcaaggccagcggctacaccttcaccaactacggcatgaactgggtgaggcaggcccccggccagggcctgaagtggatgggctggatcaacacctacaccggcgagagcacctacgccgacgacttcaagggcaggttcgccttcagcctggacaccagcgccagcaccgcctacctgcagctgagcagcctgaggggcgaggacaccgccgtgtacttctgcgccaggttcgccatcaagggcgactactggggccagggcaccaccgtgaccgtgagcagcgccagcaccggcggcggcggcagcggcggcggcggcagcggcggcggcggcagcggcggcggcggcagcgacatcgtgatgacccagagccccctgagcctggaggtgagccccggcgagcccgccagcatcagctgcaggagcaccaagagcctgctgcacagcgacggcatcacctacctgtactggtacctgcagaagcccggccagagcccccagctgctgatctaccagctgagcaacctggccagcggcgtgcccgacaggttcagcagcagcggcagcggcaccgacttcaccctgaagatcagcagggtggaggccgaggacgagggcacctactactgcgcccagaacctggagatccccaggaccttcggccagggcaccaagctggagatcaagaggacccatcatcaccatcaccat

SEQ ID NO: 287 - DNA, 1656 bp, Artificial Sequence
  Description of Artificial Sequence: Synthetic polynucleotide
atgccacctcctcgcctcctcttcttcctcctcttcctcacccccatggaagtcaggcccgaggaacctctagtggtgaaggtggaagagggagataacgctgtgctgcagtgcctcaaggggacctcagatggccccactcagcagctgacctggtctcgggagtccccgcttaaacccttcttaaaactcagcctggggctgccaggcctgggaatccacatgaggcccctggccatctggcttttcatcttcaacgtctctcaacagatggggggcttctacctgtgccagccggggcccccctctgagaaggcctggcagcctggctggacagtcaatgtggagggcagcggggagctgttccggtggaatgtttcggacctaggtggcctgggctgtggcctgaagaacaggtcctcagagggccccagctccccttccgggaagctcatgagccccaagctgtatgtgtgggccaaagaccgccctgagatctgggagggagagcctccgtgtctcccaccgagggacagcctgaaccagagcctcagccaggacctcaccatggcccctggctccacactctggctgtcctgtggggtaccccctgactctgtgtccaggggccccctctcctggacccatgtgcaccccaaggggcctaagtcattgctgagcctagagctgaaggacgatcgcccggccagagatatgtgggtaatggagacgggtctgttgttgccccgggccacagctcaagacgctggaaagtattattgtcaccgtggcaacctgaccatgtcattccacctggagatcactgctcggccaggaggaggtgggtctggaggtggaggatctggtggaggtgggtctggaggaggtgggtctcaggttcagctggtgcagtctggtgctgaggatgtgaagcctgatgcctcagtgaagctctcctgcaaggcttctggttacacattcactgactactacatgcactgggtgcgtcaggcccctggtcaaggtcttgagtggatgggtcgtgttaatcctaaccggaggggtactacctacaaccagaaattcgagggccgtgtcaccatgaccacagacacatccacgagcacagcctacatgcagctgagtagcctgcgtggtgaagacacggccgtgtattactgtgcgcgtgcgaactggcttgactactggggccagggcaccaccgtcaccgtctcctccgcctccaccgggggaggtgggtctggaggtggaggatctggtggaggtgggtctggtggaggtgggtctgacatccagatgacccagtctccatcctccctggaggcatctgtaggagacagagtcaccatcacttgcagtgtcagctcaagtgtatcctccatttacttgcactggtatcagcagaaaccagggaaaagccctaagctcctgatctatagcacatccaacttggcttctggagtcccagataggttcagtggcagtggatctgggacagatttcactctcaccatcagcagtctgcaagccgaagatgagggcacttactactgtcaagtctacagtggttacccgctcacgttcggcggagggaccaagctggagatcaaacgaactcatcatcaccatcaccat

SEQ ID NO: 288 - DNA, 1665 bp, Artificial Sequence
  Description of Artificial Sequence: Synthetic polynucleotide
atgccacctcctcgcctcctcttcttcctcctcttcctcacccccatggaagtcaggcccgaggaacctctagtggtgaaggtggaagagggagataacgctgtgctgcagtgcctcaaggggacctcagatggccccactcagcagctgacctggtctcgggagtccccgcttaaacccttcttaaaactcagcctggggctgccaggcctgggaatccacatgaggcccctggccatctggcttttcatcttcaacgtctctcaacagatggggggcttctacctgtgccagccggggcccccctctgagaaggcctggcagcctggctggacagtcaatgtggagggcagcggggagctgttccggtggaatgtttcggacctaggtggcctgggctgtggcctgaagaacaggtcctcagagggccccagctccccttccgggaagctcatgagccccaagctgtatgtgtgggccaaagaccgccctgagatctgggagggagagcctccgtgtctcccaccgagggacagcctgaaccagagcctcagccaggacctcaccatggcccctggctccacactctggctgtcctgtggggtaccccctgactctgtgtccaggggccccctctcctggacccatgtgcaccccaaggggcctaagtcattgctgagcctagagctgaaggacgatcgcccggccagagatatgtgggtaatggagacgggtctgttgttgccccgggccacagctcaagacgctggaaagtattattgtcaccgtggcaacctgaccatgtcattccacctggagatcactgctcggccaggaggaggtgggtctggaggtggaggatctggtggaggtgggtctggaggaggtgggtctcaggtgcagctgcaggagagcggccccggcgacgtgaagcccagcgagaccctgagcctgacctgcaccgtgagcggcggcagcgtgagcagcggcgactactactggacctggatcaggcagagccccggcaagggcctggagtggatcggccacatctactacagcggcaacaccaactacaaccccagcctgaagagcaggctgaccatcagcatcgacaccagcaagaccaccttcagcctgcagctgagcagcgtgaccggcgaggacaccgccatctactactgcgtgagggacagggtgaccggcgccttcgacatctggggccagggcaccaccgtgaccgtgagcagcgccagcaccggcggcggcggcagcggcggcggcggcagcggcggcggcggcagcggcggcggcggcagcgacatccagatgacccagagccccagcagcctggaggccagcgtgggcgacagggtgaccatcacctgccaggccagccaggacatcagcaactacctgaactggtaccagcagaagcccggcaagagccccaagctgctgatctacgacgccagcaacctggagaccggcgtgcccgacaggttcagcggcagcggcagcggcaccgacttcaccttcaccatcagcagcctgcaggccgaggacgagggcacctacttctgccagcacttcgaccacctgcccctggccttcggcggcggcaccaagctggagatcaagaggacccatcatcaccatcaccat

SEQ ID NO: 289 - DNA, 861 bp, Artificial Sequence
  Description of Artificial Sequence: Synthetic polynucleotide
atggagacagacacactcctgctatgggtactgctgctctgggttccaggttccactggtgacatcgtgctgacccagagcccccccagcctggccatgagcctgggcaagagggccaccatcagctgcagggccagcgagagcgtgaccatcctgggcagccacctgatccactggtaccagcagaagcccggccagccccccaccctgctgatccagctggccagcaacgtgcagaccggcgtgcccgccaggttcagcggcagcggcagcaggaccgacttcaccctgaccatcgaccccgtggaggaggacgacgtggccgtgtactactgcctgcagagcaggaccatccccaggaccttcggcggcggcaccaagctggagatcaagggcagcaccagcggcagcggcaagcccggcagcggcgagggcagcaccaagggccagatccagctggtgcagagcggccccgagctgaagaagcccggcgagaccgtgaagatcagctgcaaggccagcggctacaccttcaccgactacagcatcaactgggtgaagagggcccccggcaagggcctgaagtggatgggctggatcaacaccgagaccagggagcccgcctacgcctacgacttcaggggcaggttcgccttcagcctggagaccagcgccagcaccgcctacctgcagatcaacaacctgaagtacgaggacaccgccacctacttctgcgccctggactacagctacgccatggactactggggccagggcaccagcgtgaccgtgagcagcggaggaggtgggtctggaggtggaggatctggtggaggtgggtctcatcatcaccatcaccat

SEQ ID NO: 290 - DNA, 858 bp, Artificial Sequence
  Description of Artificial Sequence: Synthetic polynucleotide
atggagtttgggctgagctgggttttcctcgttgctctttttagaggtgtccagtgtcagatccagctggtgcagagcggccccgagctgaagaagcccggcgagaccgtgaagatcagctgcaaggccagcggctacaccttcaccgactacagcatcaactgggtgaagagggcccccggcaagggcctgaagtggatgggctggatcaacaccgagaccagggagcccgcctacgcctacgacttcaggggcaggttcgccttcagcctggagaccagcgccagcaccgcctacctgcagatcaacaacctgaagtacgaggacaccgccacctacttctgcgccctggactacagctacgccatggactactggggccagggcaccagcgtgaccgtgagcagcggcagcaccagcggcagcggcaagcccggcagcggcgagggcagcaccaagggcgacatcgtgctgacccagagcccccccagcctggccatgagcctgggcaagagggccaccatcagctgcagggccagcgagagcgtgaccatcctgggcagccacctgatccactggtaccagcagaagcccggccagccccccaccctgctgatccagctggccagcaacgtgcagaccggcgtgcccgccaggttcagcggcagcggcagcaggaccgacttcaccctgaccatcgaccccgtggaggaggacgacgtggccgtgtactactgcctgcagagcaggaccatccccaggaccttcggcggcggcaccaagctggagatcaagggaggaggtgggtctggaggtggaggatctggtggaggtgggtctcatcatcaccatcaccat

SEQ ID NO: 291 - DNA, 1695 bp, Artificial Sequence
  Description of Artificial Sequence: Synthetic polynucleotide
atgccacctcctcgcctcctcttcttcctcctcttcctcacccccatggaagtcaggcccgaggaacctctagtggtgaaggtggaagagggagataacgctgtgctgcagtgcctcaaggggacctcagatggccccactcagcagctgacctggtctcgggagtccccgcttaaacccttcttaaaactcagcctggggctgccaggcctgggaatccacatgaggcccctggccatctggcttttcatcttcaacgtctctcaacagatggggggcttctacctgtgccagccggggcccccctctgagaaggcctggcagcctggctggacagtcaatgtggagggcagcggggagctgttccggtggaatgtttcggacctaggtggcctgggctgtggcctgaagaacaggtcctcagagggccccagctccccttccgggaagctcatgagccccaagctgtatgtgtgggccaaagaccgccctgagatctgggagggagagcctccgtgtctcccaccgagggacagcctgaaccagagcctcagccaggacctcaccatggcccctggctccacactctggctgtcctgtggggtaccccctgactctgtgtccaggggccccctctcctggacccatgtgcaccccaaggggcctaagtcattgctgagcctagagctgaaggacgatcgcccggccagagatatgtgggtaatggagacgggtctgttgttgccccgggccacagctcaagacgctggaaagtattattgtcaccgtggcaacctgaccatgtcattccacctggagatcactgctcggccaggaggaggtgggtctggaggtggaggatctggtggaggtgggtctggaggaggtgggtctgacatcgtgctgacccagagcccccccagcctggccatgagcctgggcaagagggccaccatcagctgcagggccagcgagagcgtgaccatcctgggcagccacctgatccactggtaccagcagaagcccggccagccccccaccctgctgatccagctggccagcaacgtgcagaccggcgtgcccgccaggttcagcggcagcggcagcaggaccgacttcaccctgaccatcgaccccgtggaggaggacgacgtggccgtgtactactgcctgcagagcaggaccatccccaggaccttcggcggcggcaccaagctggagatcaagggcagcaccagcggcagcggcaagcccggcagcggcgagggcagcaccaagggccagatccagctggtgcagagcggccccgagctgaagaagcccggcgagaccgtgaagatcagctgcaaggccagcggctacaccttcaccgactacagcatcaactgggtgaagagggcccccggcaagggcctgaagtggatgggctggatcaacaccgagaccagggagcccgcctacgcctacgacttcaggggcaggttcgccttcagcctggagaccagcgccagcaccgcctacctgcagatcaacaacctgaagtacgaggacaccgccacctacttctgcgccctggactacagctacgccatggactactggggccagggcaccagcgtgaccgtgagcagcggaggaggtgggtctggaggtggaggatctggtggaggtgggtctcatcatcaccatcaccat

SEQ ID NO: 292 - DNA, 1695 bp, Artificial Sequence
  Description of Artificial Sequence: Synthetic polynucleotide
atgccacctcctcgcctcctcttcttcctcctcttcctcacccccatggaagtcaggcccgaggaacctctagtggtgaaggtggaagagggagataacgctgtgctgcagtgcctcaaggggacctcagatggccccactcagcagctgacctggtctcgggagtccccgcttaaacccttcttaaaactcagcctggggctgccaggcctgggaatccacatgaggcccctggccatctggcttttcatcttcaacgtctctcaacagatggggggcttctacctgtgccagccggggcccccctctgagaaggcctggcagcctggctggacagtcaatgtggagggcagcggggagctgttccggtggaatgtttcggacctaggtggcctgggctgtggcctgaagaacaggtcctcagagggccccagctccccttccgggaagctcatgagccccaagctgtatgtgtgggccaaagaccgccctgagatctgggagggagagcctccgtgtctcccaccgagggacagcctgaaccagagcctcagccaggacctcaccatggcccctggctccacactctggctgtcctgtggggtaccccctgactctgtgtccaggggccccctctcctggacccatgtgcaccccaaggggcctaagtcattgctgagcctagagctgaaggacgatcgcccggccagagatatgtgggtaatggagacgggtctgttgttgccccgggccacagctcaagacgctggaaagtattattgtcaccgtggcaacctgaccatgtcattccacctggagatcactgctcggccaggaggaggtgggtctggaggtggaggatctggtggaggtgggtctggaggaggtgggtctcagatccagctggtgcagagcggccccgagctgaagaagcccggcgagaccgtgaagatcagctgcaaggccagcggctacaccttcaccgactacagcatcaactgggtgaagagggcccccggcaagggcctgaagtggatgggctggatcaacaccgagaccagggagcccgcctacgcctacgacttcaggggcaggttcgccttcagcctggagaccagcgccagcaccgcctacctgcagatcaacaacctgaagtacgaggacaccgccacctacttctgcgccctggactacagctacgccatggactactggggccagggcaccagcgtgaccgtgagcagcggcagcaccagcggcagcggcaagcccggcagcggcgagggcagcaccaagggcgacatcgtgctgacccagagcccccccagcctggccatgagcctgggcaagagggccaccatcagctgcagggccagcgagagcgtgaccatcctgggcagccacctgatccactggtaccagcagaagcccggccagccccccaccctgctgatccagctggccagcaacgtgcagaccggcgtgcccgccaggttcagcggcagcggcagcaggaccgacttcaccctgaccatcgaccccgtggaggaggacgacgtggccgtgtactactgcctgcagagcaggaccatccccaggaccttcggcggcggcaccaagctggagatcaagggaggaggtgggtctggaggtggaggatctggtggaggtgggtctcatcatcaccatcaccat

SEQ ID NO: 293 - DNA, 2313 bp, Artificial Sequence
  Description of Artificial Sequence: Synthetic polynucleotide
atgccacctcctcgcctcctcttcttcctcctcttcctcacccccatggaagtcaggcccgaggaacctctagtggtgaaggtggaagagggagataacgctgtgctgcagtgcctcaaggggacctcagatggccccactcagcagctgacctggtctcgggagtccccgcttaaacccttcttaaaactcagcctggggctgccaggcctgggaatccacatgaggcccctggccatctggcttttcatcttcaacgtctctcaacagatggggggcttctacctgtgccagccggggcccccctctgagaaggcctggcagcctggctggacagtcaatgtggagggcagcggggagctgttccggtggaatgtttcggacctaggtggcctgggctgtggcctgaagaacaggtcctcagagggccccagctccccttccgggaagctcatgagccccaagctgtatgtgtgggccaaagaccgccctgagatctgggagggagagcctccgtgtctcccaccgagggacagcctgaaccagagcctcagccaggacctcaccatggcccctggctccacactctggctgtcctgtggggtaccccctgactctgtgtccaggggccccctctcctggacccatgtgcaccccaaggggcctaagtcattgctgagcctagagctgaaggacgatcgcccggccagagatatgtgggtaatggagacgggtctgttgttgccccgggccacagctcaagacgctggaaagtattattgtcaccgtggcaacctgaccatgtcattccacctggagatcactgctcggccagacaaaactcacacatgcccaccgtgcccagcacctgaactcctggggggaccgtcagtcttcctcttccccccaaaacccaaggacaccctcatgatctcccggacccctgaggtcacatgcgtggtggtggacgtgagccacgaagaccctgaggtcaagttcaactggtacgtggacggcgtggaggtgcataatgccaagacaaagccgcgggaggagcagtacaacagcacgtaccgtgtggtcagcgtcctcaccgtcctgcaccaggactggctgaatggcaaggagtacaagtgcaaggtctccaacaaagccctcccagcccccatcgagaaaaccatctccaaagccaaagggcagccccgagaaccacaggtgtacaccctgcccccatcccgggaggagatgaccaagaaccaggtcagcctgacctgcctggtcaaaggcttctatcccagcgacatcgccgtggagtgggagagcaatgggcagccggagaacaactacaagaccacgcctcccgtgctggactccgacggctccttcttcctctacagcaagctcaccgtggacaagagcaggtggcagcaggggaacgtcttctcatgctccgtgatgcacgaggctctgcacaaccactacacgcagaagagcctctccctgtctccgggtggaggaggtgggtctggaggtggaggatctggtggaggtgggtctggaggaggtgggtctgaggtgcagctggtggagtctggtggtggtcttgttcaacctggtggttctcttcgtctttcttgtgctgcttctggttttaatattaaagatacttatattcattgggttcgtcaagctcctggtaaaggtcttgaatgggttgctcgtatttatcctactaatggttatactcgttatgctgattctgttaaaggtcgttttactatttctgctgatacttctaaaaatactgcttatcttcaaatgaactctcttcgtgctgaagatactgctgtttattattgttctcgttggggtggtgatggtttttatgctatggattattggggtcaaggtactcttgtcaccgtctcctcagctagcaccgggggaggtgggtctggaggtggaggatctggtggaggtgggtctgacatccagatgacccagtctccttcttctctttctgcttctgttggtgatcgtgttactattacttgtcgtgcttctcaagatgttaatactgctgttgcttggtatcaacaaaaacctggtaaagctcctaaacttcttatttattctgcttcttttctttattctggtgttccttctcgtttttctggttctcgttctggtactgattttactcttactatttcttctcttcaacctgaagattttgctacttattattgtcaacaacattatactactcctcctacttttggtcaaggtaccaaggtggagatcaaacgtacg

SEQ ID NO: 294 - DNA, 2481 bp, Artificial Sequence
  Description of Artificial Sequence: Synthetic polynucleotide
atgccacctcctcgcctcctcttcttcctcctcttcctcacccccatggaagtcaggcccgaggaacctctagtggtgaaggtggaagagggagataacgctgtgctgcagtgcctcaaggggacctcagatggccccactcagcagctgacctggtctcgggagtccccgcttaaacccttcttaaaactcagcctggggctgccaggcctgggaatccacatgaggcccctggccatctggcttttcatcttcaacgtctctcaacagatggggggcttctacctgtgccagccggggcccccctctgagaaggcctggcagcctggctggacagtcaatgtggagggcagcggggagctgttccggtggaatgtttcggacctaggtggcctgggctgtggcctgaagaacaggtcctcagagggccccagctccccttccgggaagctcatgagccccaagctgtatgtgtgggccaaagaccgccctgagatctgggagggagagcctccgtgtctcccaccgagggacagcctgaaccagagcctcagccaggacctcaccatggcccctggctccacactctggctgtcctgtggggtaccccctgactctgtgtccaggggccccctctcctggacccatgtgcaccccaaggggcctaagtcattgctgagcctagagctgaaggacgatcgcccggccagagatatgtgggtaatggagacgggtctgttgttgccccgggccacagctcaagacgctggaaagtattattgtcaccgtggcaacctgaccatgtcattccacctggagatcactgctcggccagggggaggtgggtctggaggtggaggatctggtggaggtgggtctggtggaggtgggtctgaggtgcagctggtggagtctggtggtggtcttgttcaacctggtggttctcttcgtctttcttgtgctgcttctggttttaatattaaagatacttatattcattgggttcgtcaagctcctggtaaaggtcttgaatgggttgctcgtatttatcctactaatggttatactcgttatgctgattctgttaaaggtcgttttactatttctgctgatacttctaaaaatactgcttatcttcaaatgaactctcttcgtgctgaagatactgctgtttattattgttctcgttggggtggtgatggtttttatgctatggattattggggtcaaggtactcttgtcaccgtctcctcagctagcaccgggggaggtgggtctggaggtggaggatctggtggaggtgggtctgacatccagatgacccagtctccttcttctctttctgcttctgttggtgatcgtgttactattacttgtcgtgcttctcaagatgttaatactgctgttgcttggtatcaacaaaaacctggtaaagctcctaaacttcttatttattctgcttcttttctttattctggtgttccttctcgtttttctggttctcgttctggtactgattttactcttactatttcttctcttcaacctgaagattttgctacttattattgtcaacaacattatactactcctcctacttttggtcaaggtaccaaggtggagatcaaacgtacgggaggaggtgggtctggaggtggaggatctggtggaggtgggtctggaggaggtgggtctcaggtgcagctgcaggagagcggccccggcgacgtgaagcccagcgagaccctgagcctgacctgcaccgtgagcggcggcagcgtgagcagcggcgactactactggacctggatcaggcagagccccggcaagggcctggagtggatcggccacatctactacagcggcaacaccaactacaaccccagcctgaagagcaggctgaccatcagcatcgacaccagcaagaccaccttcagcctgcagctgagcagcgtgaccggcgaggacaccgccatctactactgcgtgagggacagggtgaccggcgccttcgacatctggggccagggcaccaccgtgaccgtgagcagcgccagcaccggcggaggtggcagcggcggaggtggcagcggcggaggtggcagcggcggaggtggcagcgacatccagatgacccagagccccagcagcctggaggccagcgtgggcgacagggtgaccatcacctgccaggccagccaggacatcagcaactacctgaactggtaccagcagaagcccggcaagagccccaagctgctgatctacgacgccagcaacctggagaccggcgtgcccgacaggttcagcggcagcggcagcggcaccgacttcaccttcaccatcagcagcctgcaggccgaggacgagggcacctacttctgccagcacttcgaccacctgcccctggccttcggcggcggcaccaagctggagatcaagaggaccggaggaggtgggtctcatcatcaccatcaccat

SEQ ID NO: 295 - DNA, 2481 bp, Artificial Sequence
  Description of Artificial Sequence: Synthetic polynucleotide
atgccacctcctcgcctcctcttcttcctcctcttcctcacccccatggaagtcaggcccgaggaacctctagtggtgaaggtggaagagggagataacgctgtgctgcagtgcctcaaggggacctcagatggccccactcagcagctgacctggtctcgggagtccccgcttaaacccttcttaaaactcagcctggggctgccaggcctgggaatccacatgaggcccctggccatctggcttttcatcttcaacgtctctcaacagatggggggcttctacctgtgccagccggggcccccctctgagaaggcctggcagcctggctggacagtcaatgtggagggcagcggggagctgttccggtggaatgtttcggacctaggtggcctgggctgtggcctgaagaacaggtcctcagagggccccagctccccttccgggaagctcatgagccccaagctgtatgtgtgggccaaagaccgccctgagatctgggagggagagcctccgtgtctcccaccgagggacagcctgaaccagagcctcagccaggacctcaccatggcccctggctccacactctggctgtcctgtggggtaccccctgactctgtgtccaggggccccctctcctggacccatgtgcaccccaaggggcctaagtcattgctgagcctagagctgaaggacgatcgcccggccagagatatgtgggtaatggagacgggtctgttgttgccccgggccacagctcaagacgctggaaagtattattgtcaccgtggcaacctgaccatgtcattccacctggagatcactgctcggccagggggaggtgggtctggaggtggaggatctggtggaggtgggtctggtggaggtgggtctgaggtgcagctggtggagtctggtggtggtcttgttcaacctggtggttctcttcgtctttcttgtgctgcttctggttttaatattaaagatacttatattcattgggttcgtcaagctcctggtaaaggtcttgaatgggttgctcgtatttatcctactaatggttatactcgttatgctgattctgttaaaggtcgttttactatttctgctgatacttctaaaaatactgcttatcttcaaatgaactctcttcgtgctgaagatactgctgtttattattgttctcgttggggtggtgatggtttttatgctatggattattggggtcaaggtactcttgtcaccgtctcctcagctagcaccgggggaggtgggtctggaggtggaggatctggtggaggtgggtctgacatccagatgacccagtctccttcttctctttctgcttctgttggtgatcgtgttactattacttgtcgtgcttctcaagatgttaatactgctgttgcttggtatcaacaaaaacctggtaaagctcctaaacttcttatttattctgcttcttttctttattctggtgttccttctcgtttttctggttctcgttctggtactgattttactcttactatttcttctcttcaacctgaagattttgctacttattattgtcaacaacattatactactcctcctacttttggtcaaggtaccaaggtggagatcaaacgtacgggaggaggtgggtctggaggtggaggatctggtggaggtgggtctggaggaggtgggtctgacatccagatgacccagagccccagcagcctggaggccagcgtgggcgacagggtgaccatcacctgccaggccagccaggacatcagcaactacctgaactggtaccagcagaagcccggcaagagccccaagctgctgatctacgacgccagcaacctggagaccggcgtgcccgacaggttcagcggcagcggcagcggcaccgacttcaccttcaccatcagcagcctgcaggccgaggacgagggcacctacttctgccagcacttcgaccacctgcccctggccttcggcggcggcaccaagctggagatcaagaggaccggcggaggtggcagcggcggaggtggcagcggcggaggtggcagcggcggaggtggcagccaggtgcagctgcaggagagcggccccggcgacgtgaagcccagcgagaccctgagcctgacctgcaccgtgagcggcggcagcgtgagcagcggcgactactactggacctggatcaggcagagccccggcaagggcctggagtggatcggccacatctactacagcggcaacaccaactacaaccccagcctgaagagcaggctgaccatcagcatcgacaccagcaagaccaccttcagcctgcagctgagcagcgtgaccggcgaggacaccgccatctactactgcgtgagggacagggtgaccggcgccttcgacatctggggccagggcaccaccgtgaccgtgagcagcgccagcaccggaggaggtgggtctcatcatcaccatcaccat

SEQ ID NO: 296 - DNA, 1644 bp, Artificial Sequence
  Description of Artificial Sequence: Synthetic polynucleotide
atggagtttgggctgagctgggttttcctcgttgctctttttagaggtgtccagtgtgaggtgcagctggtggagtctggtggtggtcttgttcaacctggtggttctcttcgtctttcttgtgctgcttctggttttaatattaaagatacttatattcattgggttcgtcaagctcctggtaaaggtcttgaatgggttgctcgtatttatcctactaatggttatactcgttatgctgattctgttaaaggtcgttttactatttctgctgatacttctaaaaatactgcttatcttcaaatgaactctcttcgtgctgaagatactgctgtttattattgttctcgttggggtggtgatggtttttatgctatggattattggggtcaaggtactcttgtcaccgtctcctcagctagcaccgggggaggtgggtctggaggtggaggatctggtggaggtgggtctgacatccagatgacccagtctccttcttctctttctgcttctgttggtgatcgtgttactattacttgtcgtgcttctcaagatgttaatactgctgttgcttggtatcaacaaaaacctggtaaagctcctaaacttcttatttattctgcttcttttctttattctggtgttccttctcgtttttctggttctcgttctggtactgattttactcttactatttcttctcttcaacctgaagattttgctacttattattgtcaacaacattatactactcctcctacttttggtcaaggtaccaaggtggagatcaaacgtacgggaggaggtgggtctggaggtggaggatctggtggaggtgggtctggaggaggtgggtctcaggtgcagctgcaggagagcggccccggcgacgtgaagcccagcgagaccctgagcctgacctgcaccgtgagcggcggcagcgtgagcagcggcgactactactggacctggatcaggcagagccccggcaagggcctggagtggatcggccacatctactacagcggcaacaccaactacaaccccagcctgaagagcaggctgaccatcagcatcgacaccagcaagaccaccttcagcctgcagctgagcagcgtgaccggcgaggacaccgccatctactactgcgtgagggacagggtgaccggcgccttcgacatctggggccagggcaccaccgtgaccgtgagcagcgccagcaccggcggaggtggcagcggcggaggtggcagcggcggaggtggcagcggcggaggtggcagcgacatccagatgacccagagccccagcagcctggaggccagcgtgggcgacagggtgaccatcacctgccaggccagccaggacatcagcaactacctgaactggtaccagcagaagcccggcaagagccccaagctgctgatctacgacgccagcaacctggagaccggcgtgcccgacaggttcagcggcagcggcagcggcaccgacttcaccttcaccatcagcagcctgcaggccgaggacgagggcacctacttctgccagcacttcgaccacctgcccctggccttcggcggcggcaccaagctggagatcaagaggaccggaggaggtgggtctcatcatcaccatcaccat

SEQ ID NO: 297 - DNA, 1644 bp, Artificial Sequence
  Description of Artificial Sequence: Synthetic polynucleotide
atggagtttgggctgagctgggttttcctcgttgctctttttagaggtgtccagtgtgaggtgcagctggtggagtctggtggtggtcttgttcaacctggtggttctcttcgtctttcttgtgctgcttctggttttaatattaaagatacttatattcattgggttcgtcaagctcctggtaaaggtcttgaatgggttgctcgtatttatcctactaatggttatactcgttatgctgattctgttaaaggtcgttttactatttctgctgatacttctaaaaatactgcttatcttcaaatgaactctcttcgtgctgaagatactgctgtttattattgttctcgttggggtggtgatggtttttatgctatggattattggggtcaaggtactcttgtcaccgtctcctcagctagcaccgggggaggtgggtctggaggtggaggatctggtggaggtgggtctgacatccagatgacccagtctccttcttctctttctgcttctgttggtgatcgtgttactattacttgtcgtgcttctcaagatgttaatactgctgttgcttggtatcaacaaaaacctggtaaagctcctaaacttcttatttattctgcttcttttctttattctggtgttccttctcgtttttctggttctcgttctggtactgattttactcttactatttcttctcttcaacctgaagattttgctacttattattgtcaacaacattatactactcctcctacttttggtcaaggtaccaaggtggagatcaaacgtacgggaggaggtgggtctggaggtggaggatctggtggaggtgggtctggaggaggtgggtctgacatccagatgacccagagccccagcagcctggaggccagcgtgggcgacagggtgaccatcacctgccaggccagccaggacatcagcaactacctgaactggtaccagcagaagcccggcaagagccccaagctgctgatctacgacgccagcaacctggagaccggcgtgcccgacaggttcagcggcagcggcagcggcaccgacttcaccttcaccatcagcagcctgcaggccgaggacgagggcacctacttctgccagcacttcgaccacctgcccctggccttcggcggcggcaccaagctggagatcaagaggaccggcggaggtggcagcggcggaggtggcagcggcggaggtggcagcggcggaggtggcagccaggtgcagctgcaggagagcggccccggcgacgtgaagcccagcgagaccctgagcctgacctgcaccgtgagcggcggcagcgtgagcagcggcgactactactggacctggatcaggcagagccccggcaagggcctggagtggatcggccacatctactacagcggcaacaccaactacaaccccagcctgaagagcaggctgaccatcagcatcgacaccagcaagaccaccttcagcctgcagctgagcagcgtgaccggcgaggacaccgccatctactactgcgtgagggacagggtgaccggcgccttcgacatctggggccagggcaccaccgtgaccgtgagcagcgccagcaccggaggaggtgggtctcatcatcaccatcaccat

SEQ ID NO: 298 - DNA, 2030 bp, Artificial Sequence; identical to SEQ ID NO: 277
  Description of Artificial Sequence: Synthetic polynucleotide

SEQ ID NO: 299 - DNA, 1515 bp, Artificial Sequence; identical to SEQ ID NO: 278
  Description of Artificial Sequence: Synthetic polynucleotide

SEQ ID NO: 300 - DNA, 828 bp, Artificial Sequence; identical to SEQ ID NO: 279
  Description of Artificial Sequence: Synthetic polynucleotide

SEQ ID NO: 301 - DNA, 1515 bp, Artificial Sequence; identical to SEQ ID NO: 280
  Description of Artificial Sequence: Synthetic polynucleotide

SEQ ID NO: 302 - DNA, 828 bp, Artificial Sequence; identical to SEQ ID NO: 281
  Description of Artificial Sequence: Synthetic polynucleotide

SEQ ID NO: 303 - DNA, 1476 bp, Artificial Sequence
  Description of Artificial Sequence: Synthetic polynucleotide
atggagtttgggctgagctgggttttcctcgttgctctttttagaggtgtccagtgtgaggtgcagctggtggagtctggtggtggtcttgttcaacctggtggttctcttcgtctttcttgtgctgcttctggttttaatattaaagatacttatattcattgggttcgtcaagctcctggtaaaggtcttgaatgggttgctcgtatttatcctactaatggttatactcgttatgctgattctgttaaaggtcgttttactatttctgctgatacttctaaaaatactgcttatcttcaaatgaactctcttcgtgctgaagatactgctgtttattattgttctcgttggggtggtgatggtttttatgctatggattattggggtcaaggtactcttgtcaccgtctcctcagctagcaccgggggaggtgggtctggaggtggaggatctggtggaggtgggtctgacatccagatgacccagtctccttcttctctttctgcttctgttggtgatcgtgttactattacttgtcgtgcttctcaagatgttaatactgctgttgcttggtatcaacaaaaacctggtaaagctcctaaacttcttatttattctgcttcttttctttattctggtgttccttctcgtttttctggttctcgttctggtactgattttactcttactatttcttctcttcaacctgaagattttgctacttattattgtcaacaacattatactactcctcctacttttggtcaaggtaccaaggtggagatcaaacgtacggacaaaactcacacatgcccaccgtgcccagcacctgaactcctggggggaccgtcagtcttcctcttccccccaaaacccaaggacaccctcatgatctcccggacccctgaggtcacatgcgtggtggtggacgtgagccacgaagaccctgaggtcaagttcaactggtacgtggacggcgtggaggtgcataatgccaagacaaagccgcgggaggagcagtacaacagcacgtaccgtgtggtcagcgtcctcaccgtcctgcaccaggactggctgaatggcaaggagtacaagtgcaaggtctccaacaaagccctcccagcccccatcgagaaaaccatctccaaagccaaagggcagccccgagaaccacaggtgtacaccctgcccccatcccgggaggagatgaccaagaaccaggtcagcctgacctgcctggtcaaaggcttctatcccagcgacatcgccgtggagtgggagagcaatgggcagccggagaacaactacaagaccacgcctcccgtgctggactccgacggctccttcttcctctacagcaagctcaccgtggacaagagcaggtggcagcaggggaacgtcttctcatgctccgtgatgcacgaggctctgcacaaccactacacgcagaagagcctctccctgtctccgggt

SEQ ID NO: 304 - DNA, 2391 bp, Artificial Sequence
  Description of Artificial Sequence: Synthetic polynucleotide
atgccacctcctcgcctcctcttcttcctcctcttcctcacccccatggaagtcaggcccgaggaacctctagtggtgaaggtggaagagggagataacgctgtgctgcagtgcctcaaggggacctcagatggccccactcagcagctgacctggtctcgggagtccccgcttaaacccttcttaaaactcagcctggggctgccaggcctgggaatccacatgaggcccctggccatctggcttttcatcttcaacgtctctcaacagatggggggcttctacctgtgccagccggggcccccctctgagaaggcctggcagcctggctggacagtcaatgtggagggcagcggggagctgttccggtggaatgtttcggacctaggtggcctgggctgtggcctgaagaacaggtcctcagagggccccagctccccttccgggaagctcatgagccccaagctgtatgtgtgggccaaagaccgccctgagatctgggagggagagcctccgtgtctcccaccgagggacagcctgaaccagagcctcagccaggacctcaccatggcccctggctccacactctggctgtcctgtggggtaccccctgactctgtgtccaggggccccctctcctggacccatgtgcaccccaaggggcctaagtcattgctgagcctagagctgaaggacgatcgcccggccagagatatgtgggtaatggagacgggtctgttgttgccccgggccacagctcaagacgctggaaagtattattgtcaccgtggcaacctgaccatgtcattccacctggagatcactgctcggccaggaggaggtgggtctggaggtggaggatctggtggaggtgggtctggaggaggtgggtctggaggaggtgggtctggaggtggaggatctggtggaggtgggtctatggcccaggtcaaactacaggagtcaggggctgagctggtgaagcctggggcctcagtgaagatgtcctgcaaggcttctggctacacatttaccagttacaatatgcactgggtaaagcagacacctggacagggcctggaatggattggagctatttatccaggaaatggtgatacttcctacaatcagaagttcaaaggcaaggccacattgactgcagacaaatcctccagcacagcctacatgcagctcagcagcctgacatctgaggactctgcggactattactgtgcaagatctaattattacggtagtagctactggttcttcgatgtctggggccaagggaccacggtcaccgtctcctcaggtggaggcggttcaggcggaggtggctctggcggtggcggatcggacatcgagctcactcagtctccaacaatcctgtctgcatctccaggggagaaggtcacaatgacttgcagggccagctcaagtgtaaattacatggactggtaccagaagaagccaggatcctcccccaaaccctggatttatgccacatccaacctggcttctggagtccctgctcgcttcagtggcagtgggtctgggacctcttactctctcacaatcagcagagtggaggctgaagatgctgccacttattactgccagcagtggagttttaatccacccacgttcggaggggggacaaagttggaaataaaacgggccgccgctggtgatcccgccgagcccaaatctcctgacaaaactcacacatgcccaccgtgcccagcacctgaactcctggggggaccgtcagtcttcctcttccccccaaaacccaaggacaccctcatgatctcccggacccctgaggtcacatgcgtggtggtggacgtgagccacgaagaccctgaggtcaagttcaactggtacgtggacggcgtggaggtgcataatgccaagacaaagccgcgggaggagcagtacaacagcacgtaccgtgtggtcagcgtcctcaccgtcctgcaccaggactggctgaatggcaaggagtacaagtgcaaggtctccaacaaagccctcccagcccccatcgagaaaaccatctccaaagccaaagggcagccccgagaaccacaggtgtacaccctgcccccatcccgggaggagatgaccaagaaccaggtcagcctgacctgcctggtcaaaggcttctatcccagcgacatcgccgtggagtgggagagcaatgggcagccggagaacaactacaagaccacgcctcccgtgctggactccgacggctccttcttcctctacagcaagctcaccgtggacaagagcaggtggcagcaggggaacgtcttctcatgctccgtgatgcacgaggctctgcacaaccactacacgcagaagagcctctccctgtctccgggt

SEQ ID NO: 305 - DNA, 1704 bp, Artificial Sequence
  Description of Artificial Sequence: Synthetic polynucleotide
atgccacctcctcgcctcctcttcttcctcctcttcctcacccccatggaagtcaggcccgaggaacctctagtggtgaaggtggaagagggagataacgctgtgctgcagtgcctcaaggggacctcagatggccccactcagcagctgacctggtctcgggagtccccgcttaaacccttcttaaaactcagcctggggctgccaggcctgggaatccacatgaggcccctggccatctggcttttcatcttcaacgtctctcaacagatggggggcttctacctgtgccagccggggcccccctctgagaaggcctggcagcctggctggacagtcaatgtggagggcagcggggagctgttccggtggaatgtttcggacctaggtggcctgggctgtggcctgaagaacaggtcctcagagggccccagctccccttccgggaagctcatgagccccaagctgtatgtgtgggccaaagaccgccctgagatctgggagggagagcctccgtgtctcccaccgagggacagcctgaaccagagcctcagccaggacctcaccatggcccctggctccacactctggctgtcctgtggggtaccccctgactctgtgtccaggggccccctctcctggacccatgtgcaccccaaggggcctaagtcattgctgagcctagagctgaaggacgatcgcccggccagagatatgtgggtaatggagacgggtctgttgttgccccgggccacagctcaagacgctggaaagtattattgtcaccgtggcaacctgaccatgtcattccacctggagatcactgctcggccaggaggaggtgggtctggaggtggaggatctggtggaggtgggtctggaggaggtgggtctggaggaggtgggtctggaggtggaggatctggtggaggtgggtctatggcccaggtcaaactacaggagtcaggggctgagctggtgaagcctggggcctcagtgaagatgtcctgcaaggcttctggctacacatttaccagttacaatatgcactgggtaaagcagacacctggacagggcctggaatggattggagctatttatccaggaaatggtgatacttcctacaatcagaagttcaaaggcaaggccacattgactgcagacaaatcctccagcacagcctacatgcagctcagcagcctgacatctgaggactctgcggactattactgtgcaagatctaattattacggtagtagctactggttcttcgatgtctggggccaagggaccacggtcaccgtctcctcaggtggaggcggttcaggcggaggtggctctggcggtggcggatcggacatcgagctcactcagtctccaacaatcctgtctgcatctccaggggagaaggtcacaatgacttgcagggccagctcaagtgtaaattacatggactggtaccagaagaagccaggatcctcccccaaaccctggatttatgccacatccaacctggcttctggagtccctgctcgcttcagtggcagtgggtctgggacctcttactctctcacaatcagcagagtggaggctgaagatgctgccacttattactgccagcagtggagttttaatccacccacgttcggaggggggacaaagttggaaataaaacgggccgccgctcatcatcaccatcaccat

SEQ ID NO: 306 - DNA, 2337 bp, Artificial Sequence
  Description of Artificial Sequence: Synthetic polynucleotide
atgccacctcctcgcctcctcttcttcctcctcttcctcacccccatggaagtcaggcccgaggaacctctagtggtgaaggtggaagagggagataacgctgtgctgcagtgcctcaaggggacctcagatggccccactcagcagctgacctggtctcgggagtccccgcttaaacccttcttaaaactcagcctggggctgccaggcctgggaatccacatgaggcccctggccatctggcttttcatcttcaacgtctctcaacagatggggggcttctacctgtgccagccggggcccccctctgagaaggcctggcagcctggctggacagtcaatgtggagggcagcggggagctgttccggtggaatgtttcggacctaggtggcctgggctgtggcctgaagaacaggtcctcagagggccccagctccccttccgggaagctcatgagccccaagctgtatgtgtgggccaaagaccgccctgagatctgggagggagagcctccgtgtctcccaccgagggacagcctgaaccagagcctcagccaggacctcaccatggcccctggctccacactctggctgtcctgtggggtaccccctgactctgtgtccaggggccccctctcctggacccatgtgcaccccaaggggcctaagtcattgctgagcctagagctgaaggacgatcgcccggccagagatatgtgggtaatggagacgggtctgttgttgccccgggccacagctcaagacgctggaaagtattattgtcaccgtggcaacctgaccatgtcattccacctggagatcactgctcggccagatcccgccgagcccaaatctcctgacaaaactcacacatgcccaccgtgcccagcacctgaactcctggggggaccgtcagtcttcctcttccccccaaaacccaaggacaccctcatgatctcccggacccctgaggtcacatgcgtggtggtggacgtgagccacgaagaccctgaggtcaagttcaactggtacgtggacggcgtggaggtgcataatgccaagacaaagccgcgggaggagcagtacaacagcacgtaccgtgtggtcagcgtcctcaccgtcctgcaccaggactggctgaatggcaaggagtacaagtgcaaggtctccaacaaagccctcccagcccccatcgagaaaaccatctccaaagccaaagggcagccccgagaaccacaggtgtacaccctgcccccatcccgggaggagatgaccaagaaccaggtcagcctgacctgcctggtcaaaggcttctatcccagcgacatcgccgtggagtgggagagcaatgggcagccggagaacaactacaagaccacgcctcccgtgctggactccgacggctccttcttcctctacagcaagctcaccgtggacaagagcaggtggcagcaggggaacgtcttctcatgctccgtgatgcacgaggctctgcacaaccactacacgcagaagagcctctccctgtctccgggtggaggaggtgggtctggaggtggaggatctggtggaggtgggtctggaggaggtgggtctatggcccaggtcaaactacaggagtcaggggctgagctggtgaagcctggggcctcagtgaagatgtcctgcaaggcttctggctacacatttaccagttacaatatgcactgggtaaagcagacacctggacagggcctggaatggattggagctatttatccaggaaatggtgatacttcctacaatcagaagttcaaaggcaaggccacattgactgcagacaaatcctccagcacagcctacatgcagctcagcagcctgacatctgaggactctgcggactattactgtgcaagatctaattattacggtagtagctactggttcttcgatgtctggggccaagggaccacggtcaccgtctcctcaggtggaggcggttcaggcggaggtggctctggcggtggcggatcggacatcgagctcactcagtctccaacaatcctgtctgcatctccaggggagaaggtcacaatgacttgcagggccagctcaagtgtaaattacatggactggtaccagaagaagccaggatcctcccccaaaccctggatttatgccacatccaacctggcttctggagtccctgctcgcttcagtggcagtgggtctgggacctcttactctctcacaatcagcagagtggaggctgaagatgctgccacttattactgccagcagtggagttttaatccacccacgttcggaggggggacaaagttggaaataaaacgggct

SEQ ID NO: 307 - DNA, 2349 bp, Artificial Sequence
  Description of Artificial Sequence: Synthetic polynucleotide
atggattttcaggtgcagattttcagcttcctgctaatcagtgcctcagtcataatgtctagaatggcccaggtcaaactacaggagtcaggggctgagctggtgaagcctggggcctcagtgaagatgtcctgcaaggcttctggctacacatttaccagttacaatatgcactgggtaaagcagacacctggacagggcctggaatggattggagctatttatccaggaaatggtgatacttcctacaatcagaagttcaaaggcaaggccacattgactgcagacaaatcctccagcacagcctacatgcagctcagcagcctgacatctgaggactctgcggactattactgtgcaagatctaattattacggtagtagctactggttcttcgatgtctggggccaagggaccacggtcaccgtctcctcaggtggaggcggttcaggcggaggtggctctggcggtggcggatcggacatcgagctcactcagtctccaacaatcctgtctgcatctccaggggagaaggtcacaatgacttgcagggccagctcaagtgtaaattacatggactggtaccagaagaagccaggatcctcccccaaaccctggatttatgccacatccaacctggcttctggagtccctgctcgcttcagtggcagtgggtctgggacctcttactctctcacaatcagcagagtggaggctgaagatgctgccacttattactgccagcagtggagttttaatccacccacgttcggaggggggacaaagttggaaataaaacgggccgccgctggaggaggtgggtctggaggtggaggatctggtggaggtgggtctggaggaggtgggtctcccgaggaacctctagtggtgaaggtggaagagggagataacgctgtgctgcagtgcctcaaggggacctcagatggccccactcagcagctgacctggtctcgggagtccccgcttaaacccttcttaaaactcagcctggggctgccaggcctgggaatccacatgaggcccctggccatctggcttttcatcttcaacgtctctcaacagatggggggcttctacctgtgccagccggggcccccctctgagaaggcctggcagcctggctggacagtcaatgtggagggcagcggggagctgttccggtggaatgtttcggacctaggtggcctgggctgtggcctgaagaacaggtcctcagagggccccagctccccttccgggaagctcatgagccccaagctgtatgtgtgggccaaagaccgccctgagatctgggagggagagcctccgtgtctcccaccgagggacagcctgaaccagagcctcagccaggacctcaccatggcccctggctccacactctggctgtcctgtggggtaccccctgactctgtgtccaggggccccctctcctggacccatgtgcaccccaaggggcctaagtcattgctgagcctagagctgaaggacgatcgcccggccagagatatgtgggtaatggagacgggtctgttgttgccccgggccacagctcaagacgctggaaagtattattgtcaccgtggcaacctgaccatgtcattccacctggagatcactgctcggccagatcccgccgagcccaaatctcctgacaaaactcacacatgcccaccgtgcccagcacctgaactcctggggggaccgtcagtcttcctcttccccccaaaacccaaggacaccctcatgatctcccggacccctgaggtcacatgcgtggtggtggacgtgagccacgaagaccctgaggtcaagttcaactggtacgtggacggcgtggaggtgcataatgccaagacaaagccgcgggaggagcagtacaacagcacgtaccgtgtggtcagcgtcctcaccgtcctgcaccaggactggctgaatggcaaggagtacaagtgcaaggtctccaacaaagccctcccagcccccatcgagaaaaccatctccaaagccaaagggcagccccgagaaccacaggtgtacaccctgcccccatcccgggaggagatgaccaagaaccaggtcagcctgacctgcctggtcaaaggcttctatcccagcgacatcgccgtggagtgggagagcaatgggcagccggagaacaactacaagaccacgcctcccgtgctggactccgacggctccttcttcctctacagcaagctcaccgtggacaagagcaggtggcagcaggggaacgtcttctcatgctccgtgatgcacgaggctctgcacaaccactacacgcagaagagcctctccctgtctccgggt

SEQ ID NO: 308 - DNA, 3318 bp, Artificial Sequence
  Description of Artificial Sequence: Synthetic polynucleotide
atgctcaggctgctcttggctctcaacttattcccttcaattcaagtaacaggagacatccagatgacacagactacatcctccctgtctgcctctctgggagacagagtcaccatcagttgcagggcaagtcaggacattagtaaatatttaaattggtatcagcagaaaccagatggaactgttaaactcctgatctaccatacatcaagattacactcaggagtcccatcaaggttcagtggcagtgggtctggaacagattattctctcaccattagcaacctggagcaagaagatattgccacttacttttgccaacagggtaatacgcttccgtacacgttcggaggggggactaagttggaaataacaggaggaggtgggtctggaggtggaggatctggtggaggtgggtctggaggaggtgggtctgaggtgaaactgcaggagtcaggacctggcctggtggcgccctcacagagcctgtccgtcacatgcactgtctcaggggtctcattacccgactatggtgtaagctggattcgccagcctccacgaaagggtctggagtggctgggagtaatatggggtagtgaaaccacatactataattcagctctcaaatccagactgaccatcatcaaggacaactccaagagccaagttttcttaaaaatgaacagtctgcaaactgatgacacagccatttactactgtgccaaacattattactacggtggtagctatgctatggactactggggtcaaggaacctcagtcaccgtctcctcagactacaaagacgatgacgacaagattgaagttatgtatcctcctccttacctagacaatgagaagagcaatggaaccattatccatgtgaaagggaaacacctttgtccaagtcccctatttcccggaccttctaagcccttttgggtgctggtggtggttggtggagtcctggcttgctatagcttgctagtaacagtggcctttattattttctgggtgaggagtaagaggagcaggctcctgcacagtgactacatgaacatgactccccgccgccccgggcccacccgcaagcattaccagccctatgccccaccacgcgacttcgcagcctatcgctccaaacggggcagaaagaaactcctgtatatattcaaacaaccatttatgagaccagtacaaactactcaagaggaagatggctgtagctgccgatttccagaagaagaagaaggaggatgtgaactgagagtgaagttcagcaggagcgcagacgcccccgcgtaccagcagggccagaaccagctctataacgagctcaatctaggacgaagagaggagtacgatgttttggacaagagacgtggccgggaccctgagatggggggaaagccgcagagaaggaagaaccctcaggaaggcctgtacaatgaactgcagaaagataagatggcggaggcctacagtgagattgggatgaaaggcgagcgccggaggggcaaggggcacgatggcctttaccagggtctcagtacagccaccaaggacacctacgacgcccttcacatgcaggccctgccccctcgcgagggcagaggaagtcttctaacatgcggtgacgtggaggagaatcccggccctatgccacctcctcgcctcctcttcttcctcctcttcctcacccccatggaagtcaggcccgaggaacctctagtggtgaaggtggaagagggagataacgctgtgctgcagtgcctcaaggggacctcagatggccccactcagcagctgacctggtctcgggagtccccgcttaaacccttcttaaaactcagcctggggctgccaggcctgggaatccacatgaggcccctggccatctggcttttcatcttcaacgtctctcaacagatggggggcttctacctgtgccagccggggcccccctctgagaaggcctggcagcctggctggacagtcaatgtggagggcagcggggagctgttccggtggaatgtttcggacctaggtggcctgggctgtggcctgaagaacaggtcctcagagggccccagctccccttccgggaagctcatgagccccaagctgtatgtgtgggccaaagaccgccctgagatctgggagggagagcctccgtgtctcccaccgagggacagcctgaaccagagcctcagccaggacctcaccatggcccctggctccacactctggctgtcctgtggggtaccccctgactctgtgtccaggggccccctctcctggacccatgtgcaccccaaggggcctaagtcattgctgagcctagagctgaaggacgatcgcccggccagagatatgtgggtaatggagacgggtctgttgttgccccgggccacagctcaagacgctggaaagtattattgtcaccgtggcaacctgaccatgtcattccacctggagatcactgctcggccagggggaggtgggtctggaggtggaggatctggtggaggtgggtctggtggaggtgggtctgaggtgcagctggtggagtctggtggtggtcttgttcaacctggtggttctcttcgtctttcttgtgctgcttctggttttaatattaaagatacttatattcattgggttcgtcaagctcctggtaaaggtcttgaatgggttgctcgtatttatcctactaatggttatactcgttatgctgattctgttaaaggtcgttttactatttctgctgatacttctaaaaatactgcttatcttcaaatgaactctcttcgtgctgaagatactgctgtttattattgttctcgttggggtggtgatggtttttatgctatggattattggggtcaaggtactcttgtcaccgtctcctcagctagcaccgggggaggtgggtctggaggtggaggatctggtggaggtgggtctgacatccagatgacccagtctccttcttctctttctgcttctgttggtgatcgtgttactattacttgtcgtgcttctcaagatgttaatactgctgttgcttggtatcaacaaaaacctggtaaagctcctaaacttcttatttattctgcttcttttctttattctggtgttccttctcgtttttctggttctcgttctggtactgattttactcttactatttcttctcttcaacctgaagattttgctacttattattgtcaacaacattatactactcctcctacttttggtcaaggtaccaaggtggagatcaaacgtacgtctagacatcatcaccatcaccat

SEQ ID NO: 309 - DNA, 3318 bp, Artificial Sequence
  Description of Artificial Sequence: Synthetic polynucleotide
atgccacctcctcgcctcctcttcttcctcctcttcctcacccccatggaagtcaggcccgaggaacctctagtggtgaaggtggaagagggagataacgctgtgctgcagtgcctcaaggggacctcagatggccccactcagcagctgacctggtctcgggagtccccgcttaaacccttcttaaaactcagcctggggctgccaggcctgggaatccacatgaggcccctggccatctggcttttcatcttcaacgtctctcaacagatggggggcttctacctgtgccagccggggcccccctctgagaaggcctggcagcctggctggacagtcaatgtggagggcagcggggagctgttccggtggaatgtttcggacctaggtggcctgggctgtggcctgaagaacaggtcctcagagggccccagctccccttccgggaagctcatgagccccaagctgtatgtgtgggccaaagaccgccctgagatctgggagggagagcctccgtgtctcccaccgagggacagcctgaaccagagcctcagccaggacctcaccatggcccctggctccacactctggctgtcctgtggggtaccccctgactctgtgtccaggggccccctctcctggacccatgtgcaccccaaggggcctaagtcattgctgagcctagagctgaaggacgatcgcccggccagagatatgtgggtaatggagacgggtctgttgttgccccgggccacagctcaagacgctggaaagtattattgtcaccgtggcaacctgaccatgtcattccacctggagatcactgctcggccagggggaggtgggtctggaggtggaggatctggtggaggtgggtctggtggaggtgggtctgaggtgcagctggtggagtctggtggtggtcttgttcaacctggtggttctcttcgtctttcttgtgctgcttctggttttaatattaaagatacttatattcattgggttcgtcaagctcctggtaaaggtcttgaatgggttgctcgtatttatcctactaatggttatactcgttatgctgattctgttaaaggtcgttttactatttctgctgatacttctaaaaatactgcttatcttcaaatgaactctcttcgtgctgaagatactgctgtttattattgttctcgttggggtggtgatggtttttatgctatggattattggggtcaaggtactcttgtcaccgtctcctcagctagcaccgggggaggtgggtctggaggtggaggatctggtggaggtgggtctgacatccagatgacccagtctccttcttctctttctgcttctgttggtgatcgtgttactattacttgtcgtgcttctcaagatgttaatactgctgttgcttggtatcaacaaaaacctggtaaagctcctaaacttcttatttattctgcttcttttctttattctggtgttccttctcgtttttctggttctcgttctggtactgattttactcttactatttcttctcttcaacctgaagattttgctacttattattgtcaacaacattatactactcctcctacttttggtcaaggtaccaaggtggagatcaaacgtacgtctagacatcatcaccatcaccatgagggcagaggaagtcttctaacatgcggtgacgtggaggagaatcccggccctatgctcaggctgctcttggctctcaacttattcccttcaattcaagtaacaggagacatccagatgacacagactacatcctccctgtctgcctctctgggagacagagtcaccatcagttgcagggcaagtcaggacattagtaaatatttaaattggtatcagcagaaaccagatggaactgttaaactcctgatctaccatacatcaagattacactcaggagtcccatcaaggttcagtggcagtgggtctggaacagattattctctcaccattagcaacctggagcaagaagatattgccacttacttttgccaacagggtaatacgcttccgtacacgttcggaggggggactaagttggaaataacaggaggaggtgggtctggaggtggaggatctggtggaggtgggtctggaggaggtgggtctgaggtgaaactgcaggagtcaggacctggcctggtggcgccctcacagagcctgtccgtcacatgcactgtctcaggggtctcattacccgactatggtgtaagctggattcgccagcctccacgaaagggtctggagtggctgggagtaatatggggtagtgaaaccacatactataattcagctctcaaatccagactgaccatcatcaaggacaactccaagagccaagttttcttaaaaatgaacagtctgcaaactgatgacacagccatttactactgtgccaaacattattactacggtggtagctatgctatggactactggggtcaaggaacctcagtcaccgtctcctcagactacaaagacgatgacgacaagattgaagttatgtatcctcctccttacctagacaatgagaagagcaatggaaccattatccatgtgaaagggaaacacctttgtccaagtcccctatttcccggaccttctaagcccttttgggtgctggtggtggttggtggagtcctggcttgctatagcttgctagtaacagtggcctttattattttctgggtgaggagtaagaggagcaggctcctgcacagtgactacatgaacatgactccccgccgccccgggcccacccgcaagcattaccagccctatgccccaccacgcgacttcgcagcctatcgctccaaacggggcagaaagaaactcctgtatatattcaaacaaccatttatgagaccagtacaaactactcaagaggaagatggctgtagctgccgatttccagaagaagaagaaggaggatgtgaactgagagtgaagttcagcaggagcgcagacgcccccgcgtaccagcagggccagaaccagctctataacgagctcaatctaggacgaagagaggagtacgatgttttggacaagagacgtggccgggaccctgagatggggggaaagccgcagagaaggaagaaccctcaggaaggcctgtacaatgaactgcagaaagataagatggcggaggcctacagtgagattgggatgaaaggcgagcgccggaggggcaaggggcacgatggcctttaccagggtctcagtacagccaccaaggacacctacgacgcccttcacatgcaggccctgccccctcgc

SEQ ID NO: 310 - DNA, 2030 bp, Artificial Sequence; identical to SEQ ID NO: 277
  Description of Artificial Sequence: Synthetic polynucleotide

SEQ ID NO: 311 - DNA, 1653 bp, Artificial Sequence
  Description of Artificial Sequence: Synthetic polynucleotide
atgccacctcctcgcctcctcttcttcctcctcttcctcacccccatggaagtcaggcccgaggaacctctagtggtgaaggtggaagagggagataacgctgtgctgcagtgcctcaaggggacctcagatggccccactcagcagctgacctggtctcgggagtccccgcttaaacccttcttaaaactcagcctggggctgccaggcctgggaatccacatgaggcccctggccatctggcttttcatcttcaacgtctctcaacagatggggggcttctacctgtgccagccggggcccccctctgagaaggcctggcagcctggctggacagtcaatgtggagggcagcggggagctgttccggtggaatgtttcggacctaggtggcctgggctgtggcctgaagaacaggtcctcagagggccccagctccccttccgggaagctcatgagccccaagctgtatgtgtgggccaaagaccgccctgagatctgggagggagagcctccgtgtctcccaccgagggacagcctgaaccagagcctcagccaggacctcaccatggcccctggctccacactctggctgtcctgtggggtaccccctgactctgtgtccaggggccccctctcctggacccatgtgcaccccaaggggcctaagtcattgctgagcctagagctgaaggacgatcgcccggccagagatatgtgggtaatggagacgggtctgttgttgccccgggccacagctcaagacgctggaaagtattattgtcaccgtggcaacctgaccatgtcattccacctggagatcactgctcggccagggggaggtgggtctggaggtggaggatctggtggaggtgggtctggtggaggtgggtctgaggtgcagctggtggagtctggtggtggtcttgttcaacctggtggttctcttcgtctttcttgtgctgcttctggttttaatattaaagatacttatattcattgggttcgtcaagctcctggtaaaggtcttgaatgggttgctcgtatttatcctactaatggttatactcgttatgctgattctgttaaaggtcgttttactatttctgctgatacttctaaaaatactgcttatcttcaaatgaactctcttcgtgctgaagatactgctgtttattattgttctcgttggggtggtgatggtttttatgctatggattattggggtcaaggtactcttgtcaccgtctcctcagctagcaccgggggaggtgggtctggaggtggaggatctggtggaggtgggtctgacatccagatgacccagtctccttcttctctttctgcttctgttggtgatcgtgttactattacttgtcgtgcttctcaagatgttaatactgctgttgcttggtatcaacaaaaacctggtaaagctcctaaacttcttatttattctgcttcttttctttattctggtgttccttctcgtttttctggttctcgttctggtactgattttactcttactatttcttctcttcaacctgaagattttgctacttattattgtcaacaacattatactactcctcctacttttggtcaaggtaccaaggtggagatcaaacgtacgcaccaccatcaccaccat

SEQ ID NO: 312 - DNA, 873 bp, Artificial Sequence
  Description of Artificial Sequence: Synthetic polynucleotide
atgccacctcctcgcctcctcttcttcctcctcttcctcacccccatggaagtcaggcccgaggaacctctagtggtgaaggtggaagagggagataacgctgtgctgcagtgcctcaaggggacctcagatggccccactcagcagctgacctggtctcgggagtccccgcttaaacccttcttaaaactcagcctggggctgccaggcctgggaatccacatgaggcccctggccatctggcttttcatcttcaacgtctctcaacagatggggggcttctacctgtgccagccggggcccccctctgagaaggcctggcagcctggctggacagtcaatgtggagggcagcggggagctgttccggtggaatgtttcggacctaggtggcctgggctgtggcctgaagaacaggtcctcagagggccccagctccccttccgggaagctcatgagccccaagctgtatgtgtgggccaaagaccgccctgagatctgggagggagagcctccgtgtctcccaccgagggacagcctgaaccagagcctcagccaggacctcaccatggcccctggctccacactctggctgtcctgtggggtaccccctgactctgtgtccaggggccccctctcctggacccatgtgcaccccaaggggcctaagtcattgctgagcctagagctgaaggacgatcgcccggccagagatatgtgggtaatggagacgggtctgttgttgccccgggccacagctcaagacgctggaaagtattattgtcaccgtggcaacctgaccatgtcattccacctggagatcactgctcggccagtactatggcactggctgctgaggactggtggctggaag

SEQ ID NO: 313 - DNA, 1659 bp, Artificial Sequence
  Description of Artificial Sequence: Synthetic polynucleotide
atgccacctcctcgcctcctcttcttcctcctcttcctcacccccatggaagtcaggcccgaggaacctctagtggtgaaggtggaagagggagataacgctgtgctgcagtgcctcaaggggacctcagatggccccactcagcagctgacctggtctcgggagtccccgcttaaacccttcttaaaactcagcctggggctgccaggcctgggaatccacatgaggcccctggccatctggcttttcatcttcaacgtctctcaacagatggggggcttctacctgtgccagccggggcccccctctgagaaggcctggcagcctggctggacagtcaatgtggagggcagcggggagctgttccggtggaatgtttcggacctaggtggcctgggctgtggcctgaagaacaggtcctcagagggccccagctccccttccgggaagctcatgagccccaagctgtatgtgtgggccaaagaccgccctgagatctgggagggagagcctccgtgtctcccaccgagggacagcctgaaccagagcctcagccaggacctcaccatggcccctggctccacactctggctgtcctgtggggtaccccctgactctgtgtccaggggccccctctcctggacccatgtgcaccccaaggggcctaagtcattgctgagcctagagctgaaggacgatcgcccggccagagatatgtgggtaatggagacgggtctgttgttgccccgggccacagctcaagacgctggaaagtattattgtcaccgtggcaacctgaccatgtcattccacctggagatcactgctcggccagggggaggtgggtctggaggtggaggatctggtggaggtgggtctggtggaggtgggtctgaggtgcagctggtggagtctggtggtggtcttgttcaacctggtggttctcttcgtctttcttgtgctgcttctggttttaatattaaagatacttatattcattgggttcgtcaagctcctggtaaaggtcttgaatgggttgctcgtatttatcctactaatggttatactcgttatgctgattctgttaaaggtcgttttactatttctgctgatacttctaaaaatactgcttatcttcaaatgaactctcttcgtgctgaagatactgctgtttattattgttctcgttggggtggtgatggtttttatgctatggattattggggtcaaggtactcttgtcaccgtctcctcagctagcaccgggggaggtgggtctggaggtggaggatctggtggaggtgggtctgacatccagatgacccagtctccttcttctctttctgcttctgttggtgatcgtgttactattacttgtcgtgcttctcaagatgttaatactgctgttgcttggtatcaacaaaaacctggtaaagctcctaaacttcttatttattctgcttcttttctttattctggtgttccttctcgtttttctggttctcgttctggtactgattttactcttactatttcttctcttcaacctgaagattttgctacttattattgtcaacaacattatactactcctcctacttttggtcaaggtaccaaggtggagatcaaacgtacgtctagacatcatcaccatcaccat

SEQ ID NO: 314 - DNA, 1671 bp, Artificial Sequence; identical to SEQ ID NO: 286
  Description of Artificial Sequence: Synthetic polynucleotide

SEQ ID NO: 315 - DNA, 1656 bp, Artificial Sequence; identical to SEQ ID NO: 287
  Description of Artificial Sequence: Synthetic polynucleotide

SEQ ID NO: 316 - DNA, 1665 bp, Artificial Sequence; identical to SEQ ID NO: 288
  Description of Artificial Sequence: Synthetic polynucleotide

SEQ ID NO: 317 - DNA, 1605 bp, Artificial Sequence; identical to SEQ ID NO: 271
  Description of Artificial Sequence: Synthetic polynucleotide

SEQ ID NO: 318 - DNA, 1581 bp, Artificial Sequence
  Description of Artificial Sequence: Synthetic polynucleotide
atgctcaggctgctcttggctctcaacttattcccttcaattcaagtaacaggagacatccagatgacacagactacatcctccctgtctgcctctctgggagacagagtcaccatcagttgcagggcaagtcaggacattagtaaatatttaaattggtatcagcagaaaccagatggaactgttaaactcctgatctaccatacatcaagattacactcaggagtcccatcaaggttcagtggcagtgggtctggaacagattattctctcaccattagcaacctggagcaagaagatattgccacttacttttgccaacagggtaatacgcttccgtacacgttcggaggggggactaagttggaaataacaggaggaggtgggtctggaggtggaggatctggtggaggtgggtctggaggaggtgggtctgaggtgaaactgcaggagtcaggacctggcctggtggcgccctcacagagcctgtccgtcacatgcactgtctcaggggtctcattacccgactatggtgtaagctggattcgccagcctccacgaaagggtctggagtggctgggagtaatatggggtagtgaaaccacatactataattcagctctcaaatccagactgaccatcatcaaggacaactccaagagccaagttttcttaaaaatgaacagtctgcaaactgatgacacagccatttactactgtgccaaacattattactacggtggtagctatgctatggactactggggtcaaggaacctcagtcaccgtctcctcaattgaagttatgtatcctcctccttacctagacaatgagaagagcaatggaaccattatccatgtgaaagggaaacacctttgtccaagtcccctatttcccggaccttctaagcccttttgggtgctggtggtggttggtggagtcctggcttgctatagcttgctagtaacagtggcctttattattttctgggtgaggagtaagaggagcaggctcctgcacagtgactacatgaacatgactccccgccgccccgggcccacccgcaagcattaccagccctatgccccaccacgcgacttcgcagcctatcgctccaaacggggcagaaagaaactcctgtatatattcaaacaaccatttatgagaccagtacaaactactcaagaggaagatggctgtagctgccgatttccagaagaagaagaaggaggatgtgaactgagagtgaagttcagcaggagcgcagacgcccccgcgtaccagcagggccagaaccagctctataacgagctcaatctaggacgaagagaggagtacgatgttttggacaagagacgtggccgggaccctgagatggggggaaagccgcagagaaggaagaaccctcaggaaggcctgtacaatgaactgcagaaagataagatggcggaggcctacagtgagattgggatgaaaggcgagcgccggaggggcaaggggcacgatggcctttaccagggtctcagtacagccaccaaggacacctacgacgcccttcacatgcaggccctgccccctcgc

SEQ ID NO: 319 - DNA, 1398 bp, Artificial Sequence
  Description of Artificial Sequence: Synthetic polynucleotide
atggagaaggacaccctgctgctgtgggtgctgctgctgtgggtgcccggcagcaccggcgaggtgaagctggtggagagcggcggcggcctggtgcagcccggcggcagcctgaagctgagctgcgccgccagcggcttcgacttcagcaggtactggatgagctgggtgaggcaggcccccggcaagggcctggagtggatcggcgagatcaacctggacagcagcaccatcaactacacccccagcctgaaggacaagttcatcatcagcagggacaacgccaagaacaccctgtacctgcagatgagcaaggtgaggagcgaggacaccgccctgtactactgcgccaggaggtacgacgccatggactactggggccagggcaccagcgtgaccgtgagcagcgccaagaccaccgcccccagcgtgtaccccctggcccccgtgtgcggcgacaccaccggcagcagcgtgaccctgggctgcctggtgaagggctacttccccgagcccgtgaccctgacctggaacagcggcagcctgagcagcggcgtgcacaccttccccgccgtgctgcagagcgacctgtacaccctgagcagcagcgtgaccgtgaccagcagcacctggcccagccagagcatcacctgcaacgtggcccaccccgccagcagcaccaaggtggacaagaagatcgagcccaggggccccaccatcaagccctgccccccctgcaagtgccccgcccccaacctgctgggcggccccagcgtgttcatcttcccccccaagatcaaggacgtgctgatgatcagcctgagccccatcgtgacctgcgtggtggtggacgtgagcgaggacgaccccgacgtgcagatcagctggttcgtgaacaacgtggaggtgcacaccgcccagacccagacccacagggaggactacaacagcaccctgagggtggtgagcgccctgcccatccagcaccaggactggatgagcggcaaggagttcaagtgcaaggtgaacaacaaggacctgcccgcccccatcgagaggaccatcagcaagcccaagggcagcgtgagggccccccaggtgtacgtgctgcccccccccgaggaggagatgaccaagaagcaggtgaccctgacctgcatggtgaccgacttcatgcccgaggacatctacgtggagtggaccaacaacggcaagaccgagctgaactacaagaacaccgagcccgtgctggacagcgacggcagctacttcatgtacagcaagctgagggtggagaagaagaactgggtggagaggaacagctacagctgcagcgtggtgcacgagggcctgcacaaccaccacaccaccaagagcttcagcaggacccccggcaag

SEQ ID NO: 320 - DNA, 708 bp, Artificial Sequence
  Description of Artificial Sequence: Synthetic polynucleotide
atggacttcggcctgatcttcttcatcgtggccctgctgaagggcgtgcagtgcgacatcgtgctgacccagagccccgccagcctggccgtgagcctgggccagagggccaccatcagctgcagggccagcgagagcgtggacgactacggcatcagcttcatgaactggttccagcagaagcccggccagccccccaagctgctgatctacgccgcccccaaccagggcagcggcgtgcccgccaggttcagcggcagcggcagcggcaccgacttcagcctgaacatccaccccatggaggaggacgacaccgccatgtacttctgccagcagagcaaggacgtgaggtggaccttcggcggcggcaccaagctggagatcaagagggccgacgccgcccccaccgtgagcatcttcccccccagcagcgagcagctgaccagcggcggcgccagcgtggtgtgcttcctgaacaacttctaccccaaggacatcaacgtgaagtggaagatcgacggcagcgagaggcagaacggcgtgctgaacagctggaccgaccaggacagcaaggacagcacctacagcatgagcagcaccctgaccctgaccaaggacgagtacgagaggcacaacagctacacctgcgaggccacccacaagaccagcaccagccccatcgtgaagagcttcaacaggaacgagtgc

SEQ ID NO: 321 - DNA, 1644 bp, Artificial Sequence
  Description of Artificial Sequence: Synthetic polynucleotide
atggagaaggacaccctgctgctgtgggtgctgctgctgtgggtgcccggcagcaccggcgaggtgaagctggtggagagcggcggcggcctggtgcagcccggcggcagcctgaagctgagctgcgccgccagcggcttcgacttcagcaggtactggatgagctgggtgaggcaggcccccggcaagggcctggagtggatcggcgagatcaacctggacagcagcaccatcaactacacccccagcctgaaggacaagttcatcatcagcagggacaacgccaagaacaccctgtacctgcagatgagcaaggtgaggagcgaggacaccgccctgtactactgcgccaggaggtacgacgccatggactactggggccagggcaccagcgtgaccgtgagcagcgccagcaccggcggcggcggcagcggcggcggcggcagcggcggcggcggcagcggcggcggcggcagcgacatcgtgctgacccagagccccgccagcctggccgtgagccagggccagagggccaccatcagctgcagggccagcgagagcgtggacgactacggcatcagcttcatgaactggttccagcagaagcccggccagccccccaagctgctgatctacgccgcccccaaccagggcagcggcgtgcccgccaggttcagcggcagcggcagcggcaccgacttcagcctgaacatccaccccatggaggaggacgacaccgccacctacttctgccagcagagcaaggacgtgaggtggaccttcggcggcggcaccaagctggagatcaagaggggaggaggtgggtctggaggtggaggatctggtggaggtgggtctggaggaggtgggtctgaggtgcagctggtggagtctggtggtggtcttgttcaacctggtggttctcttcgtctttcttgtgctgcttctggttttaatattaaagatacttatattcattgggttcgtcaagctcctggtaaaggtcttgaatgggttgctcgtatttatcctactaatggttatactcgttatgctgattctgttaaaggtcgttttactatttctgctgatacttctaaaaatactgcttatcttcaaatgaactctcttcgtgctgaagatactgctgtttattattgttctcgttggggtggtgatggtttttatgctatggattattggggtcaaggtactcttgtcaccgtctcctcagctagcaccgggggaggtgggtctggaggtggaggatctggtggaggtgggtctgacatccagatgacccagtctccttcttctctttctgcttctgttggtgatcgtgttactattacttgtcgtgcttctcaagatgttaatactgctgttgcttggtatcaacaaaaacctggtaaagctcctaaacttcttatttattctgcttcttttctttattctggtgttccttctcgtttttctggttctcgttctggtactgattttactcttactatttcttctcttcaacctgaagattttgctacttattattgtcaacaacattatactactcctcctacttttggtcaaggtaccaaggtggagatcaaacgtacgtctagagggccccatcatcaccatcaccat

SEQ ID NO: 322 - DNA, 1629 bp, Artificial Sequence
  Description of Artificial Sequence: Synthetic polynucleotide
atggacttcggcctgatcttcttcatcgtggccctgctgaagggcgtgcagtgcgacatcgtgctgacccagagccccgccagcctggccgtgagccagggccagagggccaccatcagctgcagggccagcgagagcgtggacgactacggcatcagcttcatgaactggttccagcagaagcccggccagccccccaagctgctgatctacgccgcccccaaccagggcagcggcgtgcccgccaggttcagcggcagcggcagcggcaccgacttcagcctgaacatccaccccatggaggaggacgacaccgccacctacttctgccagcagagcaaggacgtgaggtggaccttcggcggcggcaccaagctggagatcaagaggggcggcggcggcagcggcggcggcggcagcggcggcggcggcagcggcggcggcggcagcgaggtgaagctggtggagagcggcggcggcctggtgcagcccggcggcagcctgaagctgagctgcgccgccagcggcttcgacttcagcaggtactggatgagctgggtgaggcaggcccccggcaagggcctggagtggatcggcgagatcaacctggacagcagcaccatcaactacacccccagcctgaaggacaagttcatcatcagcagggacaacgccaagaacaccctgtacctgcagatgagcaaggtgaggagcgaggacaccgccctgtactactgcgccaggaggtacgacgccatggactactggggccagggcaccagcgtgaccgtgagcagcggaggaggtgggtctggaggtggaggatctggtggaggtgggtctggaggaggtgggtctgaggtgcagctggtggagtctggtggtggtcttgttcaacctggtggttctcttcgtctttcttgtgctgcttctggttttaatattaaagatacttatattcattgggttcgtcaagctcctggtaaaggtcttgaatgggttgctcgtatttatcctactaatggttatactcgttatgctgattctgttaaaggtcgttttactatttctgctgatacttctaaaaatactgcttatcttcaaatgaactctcttcgtgctgaagatactgctgtttattattgttctcgttggggtggtgatggtttttatgctatggattattggggtcaaggtactcttgtcaccgtctcctcagctagcaccgggggaggtgggtctggaggtggaggatctggtggaggtgggtctgacatccagatgacccagtctccttcttctctttctgcttctgttggtgatcgtgttactattacttgtcgtgcttctcaagatgttaatactgctgttgcttggtatcaacaaaaacctggtaaagctcctaaacttcttatttattctgcttcttttctttattctggtgttccttctcgtttttctggttctcgttctggtactgattttactcttactatttcttctcttcaacctgaagattttgctacttattattgtcaacaacattatactactcctcctacttttggtcaaggtaccaaggtggagatcaaacgtacgtctagagggccccatcatcaccatcaccat

SEQ ID NO: 323 - protein, 5 aa, Artificial Sequence
  Description of Artificial Sequence: Synthetic peptide
GGGGS

1. A recombinant adenoviral vector (Ad), adeno-associated viral (AAV) vector, oncolytic viral vector, or chimeric AAV/phage (AAVP) vector, encoding a fusion protein comprising (i) an antibody or antibody fragment to a tumor-associated antigens (TAA) or tumor-specific antigens (TSA) and (ii) an anti-idiotype antibody or fragment, or an anti-idiotype peptide.

2. The vector of claim 1, wherein the TAA or TSA is selected from the group consisting of glioma-associated antigen, carcinoembryonic antigen (CEA), β-human chorionic gonadotropin, alphafetoprotein (AFP), lectin-reactive AFP, thyroglobulin, RAGE-1 , MN-CA IX, human telomerase reverse transcriptase, RU1 , RU2 (AS), intestinal carboxyi esterase, mut hsp70-2, M-CSF, prostase, prostate-specific antigen (PSA), PAP, NY-ESO- 1 , LAGE-la, p53, prostein, PSMA, Her2/neu, survivin and telomerase, prostate-carcinoma tumor antigen- 1 (PCTA-1), MAGE, ELF2M, neutrophil elastase, ephrinB2, CD22, insulin growth factor (IGF)-I, IGF-II, IGF-I receptor and mesothelin, EphA2, HER2, GD2, Glypican-3, 5T4, 8H9, αvβ6 integrin, BCMA, B7-H3, B7-H6, CAIX, CA9, CD19, CD20, CD22, kappa light chain, CD30, CD33, CD38, CD44, CD44v6, CD44v7/8, CD70, CD123, CD138, CD171, CEA, CSPG4, EGFR, EGFRvIII, EGP2, EGP40, EPCAM, ERBB3, ERBB4, ErbB3/4, FAP, FAR, FBP, fetal AchR, Folate Receptor a, GD2, GD3, HLA-AI MAGE Al, HLA-A2, ILl IRa, IL13Ra2, KDR, Lambda, Lewis-Y, MCSP, Mesothelin, Mud, Muc16, NCAM, NKG2D ligands, NY-ESO-1, PRAME, PSCA, PSC1, PSMA, ROR1, SURVIVIN, TAG72, TEM1, TEM8, VEGRR2, carcinoembryonic antigen, HMW-MAA, and VEGF receptors.

3. The vector of claim 1, wherein the anti-idiotype antibody or fragment, or the anti-idiotype peptide, binds an anti-CD19, anti-CD20, anti-CD21, anti-CD22, anti-CD24, anti-CD79a, anti-CD79b, anti-ROR1, or anti-BCMA antibody or fragment thereof.

4. The vector of claim 3, wherein the anti-idiotype antibody or fragment, or the anti-idiotype peptide, binds an anti-CD19 antibody or fragment (e.g., an scFv).

5. (canceled)

6. The vector of claim 1, wherein the vector integrates into the genome of a cancer cell.

7. The vector of claim 1, wherein the anti-idiotype antibody or fragment, or the anti-idiotype peptide, binds a chimeric antigen receptor (CAR).

8. The vector of claim 1, wherein the anti-idiotype antibody or fragment, or the anti-idiotype peptide, binds an ADC antibody, ADCC antibody, and/or a radiotherapeutic antibody.

9. A recombinant tumor cell comprising the vector of claim 1.

10. (canceled)

11. A method of producing a recombinant tumor cell capable of expressing a fusion protein comprising (i) an antibody or antibody fragment to a tumor-associated antigens (TAA) or tumor-specific antigens (TSA) and (ii) an anti-idiotype antibody or fragment, or an anti-idiotype peptide, said method comprising (a) introducing the vector of claim 1 into a tumor cell; and (b) culturing the tumor cell such that the vector is transduced into the tumor cell.

12. (canceled)

13. The method of claim 11 wherein the TAA or TSA is selected from the group consisting of glioma-associated antigen, carcinoembryonic antigen (CEA), β-human chorionic gonadotropin, alphafetoprotein (AFP), lectin-reactive AFP, thyroglobulin, RAGE-1 , MN-CA IX, human telomerase reverse transcriptase, RU1 , RU2 (AS), intestinal carboxyi esterase, mut hsp70-2, M-CSF, prostase, prostate-specific antigen (PSA), PAP, NY-ESO- 1 , LAGE-la, p53, prostein, PSMA, Her2/neu, survivin and telomerase, prostate-carcinoma tumor antigen- 1 (PCTA-1), MAGE, ELF2M, neutrophil elastase, ephrinB2, CD22, insulin growth factor (IGF)-I, IGF-II, IGF-I receptor and mesothelin, EphA2, HER2, GD2, Glypican-3, 5T4, 8H9, αvβ6 integrin, BCMA, B7-H3, B7-H6, CAIX, CA9, CD19, CD20, CD22, kappa light chain, CD30, CD33, CD38, CD44, CD44v6, CD44v7/8, CD70, CD123, CD138, CD171, CEA, CSPG4, EGFR, EGFRvIII, EGP2, EGP40, EPCAM, ERBB3, ERBB4, ErbB3/4, FAP, FAR, FBP, fetal AchR, Folate Receptor a, GD2, GD3, HLA-AI MAGE Al, HLA-A2, IL1 IRa, IL13Ra2, KDR, Lambda, Lewis-Y, MCSP, Mesothelin, Mud, Muc16, NCAM, NKG2D ligands, NY-ESO-1, PRAME, PSCA, PSC1, PSMA, ROR1, SURVIVIN, TAG72, TEM1, TEM8, VEGRR2, carcinoembryonic antigen, HMW-MAA, and VEGF receptors.

14. The method of claim 11 wherein the anti-idiotype antibody or fragment, or the anti-idiotype peptide, binds a chimeric antigen receptor (CAR).

15. The method of claim 11 wherein the anti-idiotype antibody or fragment, or the anti-idiotype peptide, binds an ADC antibody, ADCC antibody, and/or a radiotherapeutic antibody.

16. A method of treating cancer in an individual in need thereof comprising administering a composition comprising the vector of claim 1.

17. The method of claim 16 wherein a tumor cell of the individual expresses the fusion protein.

18. (canceled)

19. The method of claim 16 wherein the fusion protein comprises an anti-idiotype antibody or fragment, or the anti-idiotype peptide, that binds a CAR.

20. The method of claim 16, wherein the anti-idiotype antibody or fragment, or the anti-idiotype peptide, binds an anti-CD19, anti-CD20, anti-CD21, anti-CD22, anti-CD24, anti-CD79a, anti-CD79b, anti-ROR1, or anti-BCMA antibody or fragment thereof.

21. The method of claim 20, wherein the anti-idiotype antibody or fragment, or the anti-idiotype peptide, binds an anti-CD19 antibody or fragment (e.g. an scFv).

22. The method of claim claim 16 wherein the fusion protein comprises an anti-idiotype antibody or fragment, or the anti-idiotype peptide, that binds an immune cell in the individual.

23. The method of claim 16 further comprising administration of CAR T cells to the individual.

24.-27. (canceled)
